United States Patent Application Publication US 2019/0183130 A1 - sequence listing, part 12

SEQ ID NO: 2 - DNA, 21303856 bp, Cryptococcus oierenis (residues 1,936,716-3,873,430 of 21,303,856)
gaggactatgtgcgaagccagatcgcggtcggatagcgactgaacgagggatcggacagcagtgaccgattgagcgatcgtcgaatctgaacaccgcagacgtagagaaggtcagtcaaggccatcgacaagcttccgctttacgcacttgtcccgctcttgagtagcgacagaaggaccttggcacagatccccttgaaagcttcaacctgttcagaacatcgaacgatagcctgaatggcctccttggaaacatccaactgggaattgcgagcatattcctgagatgaccaggacgagttcagtgggatcgtccaaaccgcagatggccaaatgatttgacagactagcaacccaccttgaattcccggatcagtaggttggcgttgctctcatggaccagacaagacagaatagcaatcttgtgcctttttatgcgggtagagtcggaactgcggacgaagaacttttcgattctatcggacaacaacaactacacggaacgtttcagagagcttttcagagagcttttcttcatagctggcatcgatagggttgcaccaggcaaccatatggtgttgactcacaggcctttgctcggcaatctccctcgccacctcccacgcagcccaagctatcccacttgcagccggcgcagaggagcaaagccgtaggagcggtggtacgattcgcttcgacgccaagccttccgattgctcctcctgaggtgcacacaggaagaatagcctgacagcggctagagtaacagcgggattgcgcgactgaaagagtggaagtgtgcaatgtaatagaagttccagatccgggtccatctcattgagggccctttgcgatcccttctctgatatcccttcaagaaggctcggagattcagcaggacccgagaccgatgcccgatgctgatcgcttccatgctgccccgttccactggtaacctggtccgtgtcgggatttgggttttccagaaatttacggacgtatcgttgcaaggttgcaagaattgcggtctgaccccactcgtcactatcgatcaacagcatacaaatcctcttgtagtagggatggagtatgctgagattatctgggcaaatagtatttaccgcctgtaaggttacccctatcgtgattgaagtgctattgtcaaggagggccagaagcatagttttgagttgaggcagagtggtggaatcagagctagtagagatgcgtgtgggatcagttcaggacctcatcaggattgcaaaagctcttactcatagactttgatcagaccaagcgcgaccgtttttcgaacccaaggattacggtcatgcaccaacttttccaaacctagcataactatagctgttatgcggagatggaggtggcaagattggtaaggcagacggattgaagagcagcaaactttaccggaacgcaaaacttgccttgaatgacgctcaggcggatactcgtcaagacgcgaatcgccatgctcctgatcaatggactcgaatccgcaaggtccctctggaatgtgttgatggagagtaagagcaagtcggaatttgtttccgcactagaatagcacagggcgatgagtcaagccctacccttcaggagagaccggcgttaacacttactacctcaagagatagatgtacacctgatacgtatgaagcattaggcaggctgtatcgcgaactgcaccaagatggaatcctcaccaatttacgtatctcaacacttgaggaagcgacttgcttcactacttgcggaaagaaggcagacatatcgcgtcctttcgaaatcatctgagcgacagttggacggtagtgtgagctggcggagctgtaactccgcttcgagatggtgtactaaccgctatcagtcgcttcatcccctccaaggtgtcggcctcgcttgctttgcttcttgaaccgtcgaacaactgcgtgatctcccgaagtttgtcatcgttgtattcgaagtaagtctgtgtcgctgggccctttccctgtagtattggcagatctcgcgtggactcctgataagcgagaggtcagtcttgggcgaataatttagaagcaaagaggccttaccttgaaggtctcagccaaacgttgagataggcgattgagcgccatgacgataggctgttcgtgaccgaattccagtccaaccgatatgccctcgagatctccttgcgatacacgatatacttgtccagtcgtcagtcagtgtgtgacgtgaccatgcaaaccgactatctaaagacggtacagtcgtcaaagtgaatcccgtagcctcgaaactgtgctttcgctgtctccgtccgattcgttccagggcacgaggatcaaagcgggatatgtatcaagtagaacagataaaatgcaagtctggctttagcctcgactatttgccatgccgcgatacgttcgggtttgcagatgtctatatggtgcaacgagctgtgattacgctcttgaggcctgatctctcggccagatgataagacgatggcagatatgcacaactgccgagtgtcaaccaacgcatattaggtactattctacttctgatcctgacctcctgccgtcgatcggcctccgtacagatgcgtgatcgtatccagtcagacctgagacctggcgctgtatagcctaatacatacaggtatgttgccgtgtcttggagagcagctggcagctggagtgggtaactgattgtatttagtagtgtcaggttgccggtcgcagtcgaaggcatccaacgttgctgaaggccttgcgatcatatcatcggtgccgtccgcgaattatacctctaccgccttttgtgttcttcggctcctcgacctggtcgactacagcagggttgcaggaaacaaccatgtctatcaaccctcgcgttcacaaccgcagacgggcaagcagcgtttctcaggctctatcgtgagtgacgcctgagacaaggggatgaagtacactcaaacggagcgttcatatgtgactcgtagcgctatccctttaaacaacgcaggccctgacgcagcacagtaagttatggtccgcgccacgaggtcagaactggttggccggtatctcataaatcactgtgaagaacgattgggtccttctcgtccgacggaaagttggaacagcctgcctgtaaccctagcttacagttgaacggctcggtcgattcatttacggctgcgcaagtagtcgcagaagagtctcaagctgcccagttgcgaagacgccatcccggtacggacgatcctcacgcaagcccgaaagtcctggcgacagagaagaacagtacaatcaagcgttcgtttgatccattcgacgatgctcgatacaagtcggacggattctggcgggatttacgaaccggcaaatggatgcttgttccaagtgagatagatggctcttctctcgggtacaagaacaaggctgatatcagcctacgcgtcagcttcttccctccctatccttatgatcccggtccttctctacctgaatcatcgttacatcatggcgaacccgaagatgccccttccggaagtgttccgccaggttgtgcccgccacgaccagaaacccctggtctgcgttgcttttcctaagcggcttcgatggacgagacgagaccggtacagccctatacaaacggcatcggaatgtatgtccggttcgattcgtgatgacaagaatcttcgctgaaatatgacgtcaggacttggcgttcattgcgtactatatcatcttcttctcattgtgagtctcgtagcatgcctcaaaggaaatttgcgttgatagtagaatcgggcggtctttgacagcgtgaggcaaagcgttactatctacttcttgaggccgctcgctaggcggctgggcattccgccggccaaatttgagcgctttactgagcgtgagtggcagttcgatgactccatgctgattgaacaagcctgatcatcgatgcgaatcagagggctacgcggtctgctacttcggcgtctttggcccactgggcatggtaagtgaagggccacaagagattctaagccttcgtcactgacggaatctccctgtgttttcaacctgcagtacgttatgaaaggcttgccgatctggtgtaagagcggtcgtccagtcatgttagatcagcatggaccgctagtctgacaaatccttctcactcttcagggtacaacacctcggccttttggacgacgtttcctgttctcagaatgaccggtctgctcaaagcatactatctgttgcaagccagctactggtgtcagcagactatcatcctagctgcagggattgagaagccgaggaaagatttcaaggaactcattgctcatgtaagtctgcatacgggtccgtccgcccatccgtaccatccgcgtcgaggctgacgcgccgagaaaattgcagcatattgtgaccttgtggttgatcggatggagctacctactgactgtgagttgtccacctcgaccgacgcatgtacgcaatcaagactaatatcgtgccaccagcttacctacatcggtgtggctatctacgtcactatggatgtttctgacatcttcctcgctctggccaagtgcgtcaactatgtcagcgaagacgcgtcccaacctgtatttgcgttcttcgtggtagtatggacgtaagtcttcgcgagcgagaccatcgaatccaagctgatattgttcatatcgtcagatatatgaggcattatctaaatatcaagatactgtattcagtatggaccgagttttacctcgtcccgtaagtgtcgtggggtcggtcaccccgacatctacatcggggaacttacatatactttgtagtgaatgggctcgcatgtcctttgcaccttggaaggagaccgagctgcttgcatggtggatgaggcctaccatcttcggatccatcctgttcctacagctcatcaatctattctggtatttcctcattctgcgcatcttgtttaggtgagtagcgtcatcttggcttcaatcttcagctcctgattgttacgactggtttgcagggcactgttttccaaaaccctgtcggatgagcggtcggacggagaagacgagtagccagtcaagtaccctatttaccatatacagcaagatcgttgccgttcatctggatagcgcatagcacgtgtcctcgttcaacttggtaaacaaaaacactcgcgttgtcgtaaaatagcttccggcgatctgcagatcctcggatcgccatcaatcgtggactgtctgctggcgaccatgcgatccatgcgacgatagacgataggaacatcatcgtgcacgatagatagtccatgatttttgggagccatttgcttgcgatgcttcattatcaggccgaacatagaccagactacgtactgcattgctttggctacagttctagctcctagatagtatacccctgcactcgaaaagatagcgacgagcgaacagcttgaaccaaacagatggcttccggcgccgaccagagtcaccgagggggcggggaatcccagaccaattttaccatgtaagggttgcatcccaactagaattttcgactagaatcgctattctgacggagactcgataggatccaagccttcgaatggtatagcgcgggcggggggaaacactggcagaaggtcaaaggacatctcgctgattgggcgagctatggcttgacttcgatgtggcttccccctcctaccaaaggatcatctactgaagggacaggttagcgttgcagggcagcagttccatgtgttctgatatgtctgatatgatacttatcaatcgacctcttttccatgctatgcaatctaggttatgatgtttatgacctgtacgacctgggcgaattcgatcagaaaggcaacgtcaggacgggatggggttcgaaggaggagttccttgaccttatcaggactggcaaagaagcaggcataatcacctacatgtgagccagtttctacatagcccacttccactaaaatgatagctgaattctgtgacccgggtgtagtggtcagttggactaagcctgtacacagtatcggtaccacggcagtcaattgatcctctcattctggttccggcacgcttcatgacgtagacgctgtcctgaaccaccgtttaggggccgacgagagtgaaacgtttaaggcaactgaggtgtcgaacgatgaccggaccaagaacctgggcgagccatacgatatcgaaggatggacgaagtgggtgcaaagatcgaaatcatcagcctgttagacaactgatgcctttcgtaaatgcttcgctgtctcgtctttctgataggttcaactttgcgggacggggggaaaagtattcgaacatgaagttaaacttcaaccatttcactggagtggacttcgataataggcaggggaaaaaggctatattccgcattgaaggagagaacaaatactgggctcaagctgttgactctgagaacaagaactacgactatctgtaagtctttctttggtcaccttcgagcctcaccactaaatcttgcttgactgacccaaacagtatggtaagttagctttgctgaaacctgccaaggcaactggacagtctagttgactattatctgcacgatatcggtgatatgttttgtaccaaagggcgctgatggtgagtgaaagtgcagcgagttacaggcaaatgtcacgatgaccaatccacatattcctccagtcgaccacgctcatggcgatgtcaagcaagatttgctgaactggggctcgtgggttttacgagagaccggtgcaagtggattcaggtaaagtcattcggctttttttaacactgttgcgctgctgacttcgacgaccgatcaatgcatctagatttgatgctgtcaaacagtgagacactcaccatcctttcgttctgcccgtgggcccgttatcttgaaactgacaggggtccgcctttgtcgaatccagtattgacgtcaacttcatctccgaattcgttaaacatatccgtgatgagagcaagaacccttctatgttctgtttaggagagtactggaaggattcattcgagacgaacaagtgagtggcacgacaattagagactgttctgaaggggcgccgactttttttttcgtacgcgtgacgcagcgaatatttggtgagacttgcctgccgcgatcaccaagaaggtcttgacgaaagctaagccggcggaagtcactggcagaacaaaatccgagaacaaatgtctctctttgactgtccccttcattataacttcaaggaagcaggcgaggctcacgcaaactacgatctacgtaagatctgggatggaagtatcgtccagaaccgccctatcgatgcggtgtgagtctgccgaagttgtcgcacgattggcggacccagcacgctgacagctaccgtgtgtctgcagaacgttggttgacaacgtgagtttctgagggcagcatcatgcatgtcccttgtcacgttgttcacgggacgactttctatctgacattgtagcacgatactcaagcgggacaagcacttgaatcatgtgtcgcctcgtggttcaagccactcgcttacgccttgattctgcttcgaatcgatggctatccgtaagaacttcttatctcggaccgaacgtttcgtcacaagggtactgaggtatttctatctcgctaaagctgcgtattctatggagatctttacggatgcgaaggagaaaacccccagccggcagtcaatcaattatccgatctgatcctcgcgagaaagctgttcgcttacggcgaagtgagggactactgggatcatcgtaagtgcatcggtccggcatagcgatgaggtgccgtccaaagaacgggaatgatgtcagactaatcatcgaacgcggtatatagcgaattgcgtaggatgggtccgaaccggatccgacagtcatagcggatgtgccgtgagtcttgaacgataccttcgtaacccggatatctattgatactgggaatcgacagatcgtcatgtcgaacggcgaaggcggaaataagagaatggaggtcggcaaggtcagcctgtcattgtaatatccgagcggagaaccagctgacgatgcggcattggaacaggagcatgcgggagagaagtggacagatctgcttggatggagccagggtgagatcgagatcggcgaagacggatgggctgaatttatctgcccaggagaaagcctgagtgtctgggctcatcaacaagccaaaggacgagacgaattctcaaagtaggccggttcgcgagtttcacaattattgttaaaatgtctatggcgctgcggtttcttcgtccgaaatttcccgagtatcgggtgaattcggagaagacaccgcgatcgatcggctgtaaaacgcatattcgatctaaaaagtgtgatcacgaccggaaactggcgcgacctcattcgtcgagaggcaaagcggggcgatcttgtgcccgggcaccctctaggtttgaacggacgatcgaactcgcctcacgacccagatccatatcatcaccgcgaaacgattgtgcaccacttcatatcaacttttaatagcttgaaaagcttgcgaagaaactcatattagtcgcttgacgctctctaagacccatacaatcgacgagactcagcttgaaaatgctcggcacttctgctaggaacatcctcactcgatcgacggcttcgacccttcgatcgacacgggcatttagctctaccccggtcgccaggtttgcctctgttgtcgaagagagccaggccgactcggaaggctctgccaaaaagaagctgatgaaggagttcaagatctaccgatgggttcgtctatgatgaccggatcaggttgacgtgggtcatcgtgctcacatgatttgcctcggacagaaccccgattcgcctagcgagaagcccacccttcagtcttacaaactcgatctctctcaatgcgggcccatggtcttggatgctcttgttagtaccgactatcttggcgtgacccgcccgtgtcgcatccgtttcattgacggccggtccaaattgtgtttacgaatctccagatcaagatcaagaacgaccttgaccctaccctgaccttccggcgatcatgccgtgaaggtatttgtggatcctgcgctatgaacattgatggggtcaacactttggcgtgtctatcgcgtatcgatcgaagcgagacgaaggcatccaagctctaccctctacctcacagtgagttccactcaacacatgtacatcgcaagatccggctctcatagatatgtcgctacagtgtatgtcgtcaaggatctcatcccggacatgacgcaattctacaagcagtacaaatcgatcgagccattcttgaagagtgataacgcacctgaaaagggggaacattaccagagcgttgaggaccgacaaaagcttgacgggatgtacgaatgcattctttgcgcatgctgctctacgtcgtgtccttcggtaagcaacagctcgaaatccatatgcataggtcgctgactcccttgttgtcgtcttcagtactggtggaaccaggacgaatacctgggacctgccgtgttgatgcaggtcggtgccgctcgtcggatttgttttctgatcagttgattgatttgtagcatctcgcttgccatataggcttatcgatggatggctgacagccgagtaagcttagcttcctccgggctcccgtcatactgctgcatttcgttgacctcctaatattcaggactcttacggcgctgagcgaaaggccaggatggagaacagtctttccgtacgcacacgcatagaggcaacccatcgatgctattcttcgagtcttacaatctacccctcgccaataggtataccgatgccactcaatcttcaactgctctaggtaggttacgatctcgtggaccgctcgctgcgcgtactcatcgtcacatcctctcattttgacaggacgtgtcccaagggtttgaaccctggtgagtttccagctcaacaccggttgatctctcagcaataatactcattccctactgttgttgcagcgagggccatcgcggccatcaagcttgaaatggccaagggtgcttgatcgcgtttcaataaaactttccccctttttctgtcttaatatgctctgtacagaatgcgatgtatagcaattgtgtttgtttctttttctttacaagacgacacgggtttccaacaggtacccgaaaatgcgtacaggtagagtcgttgctgtaccgctcgagccggttagggctctgaaggacaagggggcaaatagctgagttcgtttcatatgtcgtaagtcttcgtaaaaagcttcattttctgtgaggtccttcgatctacatgtagagctggatcgacggtccgtcactgaatccggatatctgtgttgttggaggacgtgcgtcagtcttaggatagaatattaattcgggaccgcacgtaccccatatatatccactcgcttgttcggcccgattgacgataaggtttttgctcgtgtgatagcctgtgttatcgctctgccggagaaatagcaacggtagactcgagccgcctagctgtttactcctcggaatatgaccttgggcttggagtatgccgtcaaacggccttttcgtgattttcacgagaggaggattgacactctgcaaaggcgattctaccaaggtcggggctggcggtaccgttcgggggcgcttgggcccgcctcgaagaggcttttctttcacgactttgggccttttctctttgctcggctttttgctccgcttccctttagactgttttgatgaagacgggccgctctcgggggtttcgatttcgcctgtcatatccatcccagccagattggcaaggtcaaggtctggatcggtgggtggtccagatacttcgtcaagatgagcctcattgctgtcctgtaattgggtggcatctgctaacgtcgcttgatgctgcgcgagaatcgcgtgaggatcaagcatgtctgaaccactttgagccgcttgcgcagcggcctcgagggcgcgcgctgtgaatatgccgatatcggttgcgaccccttggacataagtcatgtcgctgtgcaatatcgaatcgacctgcgagcgcgctgcttgagccgcgaggagagcgatttggtgctgatcatccatattgaaaccctctgcgctgaacgggttcaagcccgtgtaggcagacaaatccccatcgtgttcctgcagttgagcttgacgaacgaggttctccaccatttctcgagtaatctcattctcctggtgatcaggttgtccgtcggtcccatcctgtccaaaattcggctgctgtagatcatgttgcgcaaactccgcttgcgtgaagtggttgatcggcaaatcgtgcccagcaacttcgccagtttggccgtcgacatcatgcacaacagtatggtgctcatcaatgactgcagattgcacgttcacctcagctcctgcggtcggagtggattcgcctatttcttcagtctgcatttcgcttgtacccgctggctcttcgggtgcaggtggttcatccgagggtgctgacatctcggtgttgccagagcgctgtggaagtggtggatcgtcggcaggcccatcggaaaccggtagactaggctggaagtcgtggtctgctgacttcttcttcttcttcttatcctggtccgacttgatgaaaggtggcagaatgggaaggtgtacgtgatcgtccacaccatcctcagccgcaagagcgctgtgagacagcaactcgatttgcgccttcctttcatatctctctcgctcaatctgagtggcattccacatgtccagcggatccggacagctgatgacaagtacggtatgttcaacgttccgaggaacggcagagtatggtctcgtttctggagatccatcaggaccaccatctgacgcgatggcagggaatttatgaggttccttgtccaccagttcccagttgtcttcaggcgcaatcgactgatatgtcctgacgcgcaatgggccaattgcccccaggtagagatacagaggtttgtcacggtaaagcacgttgtcgtcgtcatagaagtaattagtcacggccatagtgatggtgttatctcgatcgttgtaaaccggtgcctcgagaatctctggcataggagtcaaggggaatttgaagacggttgaatagtcgccaatctcgtgtcgaccctcgaagaaggtgaagttgtgttcggctgaaaaaaagcggctcatcgatcagtttcgtggcgggttatattatgaccttcttagtagcgcatggtcatgtctacgtactgatgccgcttattgtccaggtcagataatcgtctaggaactctctttcttccagacctgagtccccttcttccagctttatctgcggggcactgtacagcgcgggagatagaccgggcttctcttcggacagatccccatcgacgcgagatgaggttgattggggcgcgactcttgaatccggtgcttccggaagttcagatccgtatgaaccgtttgaacgagcgtgcgtcgcggtctgaacgtcgtgcttcggctcagacccgggagggtatccttcagactgctgttcggatactgtcaggtcgtccttttctttcttctgctttgtcttcttgctcgagtgcgaacgagggcctcttttgtctctgaccctttctatcatcggcgaacggagataccatctaccctgatgcggcactgttttggcaaaggcgattctatgcaactcggatactggaccgtaatcatgaagatagacggcgccattgatgaccttgcacagcaatagaggctccgtccgatattgggtctggatatctctgagtatgacgatactaccgtatgttagaatgtcgggatccgggacatgatctcgaggatgaccttccggcggctcgccccgtctgacgacatccatgacccaagccgaccaatctgcattgcggccgacgagcaggcctctgtcgatgtcgacatataagtaacgggtcatgacagtttgagcagacacgcgtgaccaaagcgcaaaaggatccccaatacggatgccgatggctttgctattcttgctgggtttggtgataccgatcgtttgcttggatggcttcgaaacgatttgaattccgctagcctcgaaagtagcccaaggacgatcgctgatttggaatcgattgaagtcctcaacaagcccagtggcaccagcaagacggtcgtcctcctggttgggtagggtggcggcctcggcgtcgtctcctgcttctggagtgtactcgaatcttttgtctctctccccgagttgtttagagctttctgaaggctcttcaccctctgtatcgttacggatcatgtcctgaatctcgagcgggacttgatcgcctccagactgcgacgcattctgtcgttccactgcctcggttctggatgacgcaccgggttccgcaggtgaagacagttttttctcatgttcgctcttccttaccgctgtcgaggcatgttcttcgtcaccagcggcaaggtctgtcaaagcgaagatgtcctcgccgtccgcattgccgtttttgtgctcagcagccgtctccgaatcaaacatttcctcgatggggtctacgatctcgtcgtcttgctctctgggcagagtacccccaggctgaaatacgtccagtcggaggcgcagaccctttgcctttccagtacgactagcgtaaagacccggaaaagaaattccttctcgaaggtgcgcccgggcgtccaggtctcgctcgagcatatctaagcggactccttgcgtgttagagatgaccgggatgtcttcccccacatcagcattgaccagtttgaagacagtagtttcgatagtatcgctgatattccctgtcatccgcaccaccggcggggggcataagaaccgcttctccttgccgtatgatttttgagcgatatgaccatgcatgattgtgatggtggagaaggacatctgttgctccggtactcgagagcctgacggtccgatggtcgctgcaaacatccgcgtaattttggcacggcggaggtcagacagcggcggcgatgtcgctcgacgtttcattggattcgggttgatacgtcgcgaaccgactggaggtgtggtgaccgtctcagttgcgacttccgattgacctgcatgctgtccgttctgatcaatagcaagagggtcagctcttggttgggaagaacagaaaaccccatctctcgcttacctgttccgaagcgataccatcgccgtcaccagcgtcggcgctaatcatgcgactagcagcaagcagtccttgaatcgaattgcccgtctgttcgccttcgccaacttcgttcgaatcgatctggtccagcagtgtcccctcacggtgtgccgaggcgtcctgttgctgaggatgttgggagatatcttcgggatcatacctcaggaacacgtcctcttcatgcaagatgtcttcaggtcgcatctcgctgttgtggcgatcggcagcgctctcgtcctgataccgactgccctgctcgccagtatcttgatggatggagggcttggagatggcggtcaacaagaggtctagcggtccatgatgatctgtctgcatgcgttccaagttgcaggtcaaagaggaaagtcagccacagagttcttaggctcagtgaacgcgaagcaagggcaagacgatgctggtctttgccagcggtttgcgaaattacgagatgcgagcaagtgtatgataatggatatgtacctcgctaaatttgtgccctgcttctgtaccgaccgtcctttctacatcatcggcatgatcggcaagcaacccggcacccgactcctcgaagtattgattcaaggttgcctggtccatcagaggtggacggtgtacgaaaggacgcagtcctgtcgaacgcggtaggttccgcctcagagccagagcagaacgctattcctatgggcggtgaatgagatggaaattgtcgaggtgatcttttggtgaaatgatgttctactcgggtatgtggtgagcgtagtgtgggtcaacgagtcgatcggtttcgcacgagtaaaagattgggaggaaagggggggttcgttactagaggaaaggggaagctcgatcagagcgtagactctccgtctacccgatcaacctgccagccagccttaccgatctgcacaccatgggaatcaaatggcttcaacgcgtcgtcgcgagcgcgtctctttctttcaatttgatgattctctttagcctgcatgctgtgtcttacaacaatcgtataatcatacaagccgcacatcgcgctgttaaaacccgacgatgattcgttggatcgctccatctccaaatctaagtttcccaccaattaccatcgtctcgactagtcgtacttggtcccgaattgttcgatgttgggccccttttgggacgtttagcggccgtcacgtcttggactgaggtttttcgtttgatgcctccaggcgcagagtctcgctcatgactcttcttgcctggtcctgaggcagggtcgagcactgcacccttcttttgcttggccaggaacgcttgagtctccttccacatcgcctgctcccactctgccttgtgtaggcggtaaagtgccatcgtggctcttgcatctgtgacctgtagcatgatacaagtacaggcataagcggcccaattctcagattcgatatgacaggcttgatttttacttaccgaactatgagcaccgctttgaattttcaagccaagttcgagttcagtgagctttttcaaaccgggcattttcgtttttgcaatctgtcgtagcgccgcatttctctgtgtatccctcaaaagaggagagggatgcgacaacagtaaagcctggatcatggggggagggggggggggaataagactcgtatctttcaggtgagccctcatcccacctgctcaccttggtgtcgttctctacagcatgtccaatcacgatcttgccgtcgatgagcttggcgacttctgcttggacatcctcgaagtgacgagcatcgttcatgtctttgggtcgaacaccggagacccaagttctccaatccgtcaccctctcctttggtcggacgaaagtgtcaaggacgatgtaaccgtgatagttgacgatcgagacccgagctagacatgactccatgccgttgatgcccaagccgaccatctcgcaatcaatggcaagactgcaaaaagggtaacatgctacaggtcaatttgctgtcgcgggaatcgcacattggatcctttgacaacgctcagacgtactagttccccggtaccctctgactctccctgtcgtacttggtaagacccgacaccatatctcggagttcccttcgcagtgccgtattcttctctgcaggtaattcgacaagggcgacagggctatcccctggtactggatgcactaccgatgactttccctggctagtatgataaggccaggcggtatcagcaaaatatcattttgcctgtctaggcgttgtcgcaactggacttgccgtggctgttcacgcgaaaggtcgttcggttcagctgaccctaagaccttctgcgtcaggtcatcggtcgacttggctctctttgcagccttctctttcgaagcctccgccttgtcctcattgatctcttccagagatatccctcccttcgatgtagcgatggcttgactcgcccagtgaagcatcatgcctcggtcctgctcctcctcgacagcatcgtcaacctcttcttttttgatcgaagtctttcccttggaatcgccacctttctttgtggaccgactcttagcttcgaccgaggtccgagaagagcttgcttctgctgacttggcgtgtagcagggcggctaacccgccgactcctagagcttttgccctcccgtcgactttagctgctgcccgagctgggtccgatcgggatttcgcaatcgacttggtactgctaccctccttcgaatccgtcatcttgctccgagagggatttttggcagaaggtttcgtttctttccccgaaccagacgaactcgatcgcttcggcttgacatcgacttcagccttgatagaggagggcatgattgtgctggagaaggcagattggttttgcaaagatttgaggacgctagggatttcaagaaggacaagcttcgcaagtcgcatcagaacggccgataactagtctctttgttgggacgatcattggtacagtccatagttgacgctactctagtttagccgctaacgacaagacagacctgctcaagaattatatgaatccgagatccggaagcaattagatcgagcccgagccgtcgttggcccggtcagagtacgtagggaggggcaatcgtcaatcaggatgtatcaattatgtattccatggccatcagccatcaggcctggtggacgagttcagtgtctacagactgaagtgcaggcatttgtttgcctctatgaggtgccatctagcgttgtggtcatgttcggcattgaggactcgtcttcctttgtctctgtgccgctacctggggattcaagggcgggatcatccatacaatcttggatcttctgggcaacctgatatttgaggccggagatgtcagtcttgatgttggtggcacgcgggacagtctccaaattctaccttttccaggtctccaagcgcaccgtccactatgatcgatttgtgtcgaatgaccgttattgacgacttcaaggcggccagattttccccaagttcttgcagcgatgattctctcctgttaaaggtgaaagctaccggctgtcagtacaaatatctgaaacctagcgcttctgacactcacgattgtacagcctggatctcttgttcgagtttagccagtatgctgacgtgtgagaaggtagggtcgtcttgaggtgctgttacttcctttcagttagttgtcgccttttggaagctagcttggcattactaacgaaaatcttcgatggcattcatatcgacctccctttgcaggatggcggggtcgatctcgttcacctggccttccagaggactgaaccaaacatgttcgttagtaaactatgggatatgacacgttacttgatctggaatatatcgagacgtacatagtctgacgagtcattcgagtgcgcttcccctgcaacccttccttttccctccttaaccgcttcaacttcatttgtgcgtcgtctaacttgtttctcgcaattctcgttcgcttttgaacagtttgtaaggcaatttgatgctgccgatgagcggctcgaaggtaagatgtggaagattccgccggaacagaagcaaggattgcatcggggagaatagctggaaacccccatccaatggcttgatacatgttgggatctgaggaggtcattctcgaaggtgcgaattcctttgccttggataaatcgcccgctattagcagagtacagagtgatggtcttcaccaagtgcggtctcgacctgtgtctgtctggcctttgagcgacggatgagcgacggctgagcaacggatgaggttgttatcaacttcggtgaccgagcaaggtaggcaacatcgcgcgaaccacgaagagtccaaggtctgattgagactttcagaccgaggtggtacatcgtgatctcgtcgatttcagactcgtgcgcatgtcaatagcctcgcactcgcaccccgccatctaccgtcaagagcgagtatagcatcaccagcgtcatcataatgaacttcttcaccacggcgaacaaggcccttgccaactgcttggccggtccgtctagcgtgtcagctcgtcaatacggatcttctgcagctcgcagtgcagcctcactgtcaaccaagagcacagcagtacctggatacggccatttcacgacagcggtgaggaagatttttctggactatcatgccgatagcgtagctcaacgaggactcaggtaagcactggctcatggcgtactcgcaaatactcttgtcctctaacttgcccatgcaacatggcactcatccgaccgatagagctttcatccgagaagacctcgttgatgttgcgaaaggaagcccggacgttgagttcgtcgtgcgtaggctgaagcagggaaaggctgccttactgcgaggacattacggtaagcggagggacggtaccagggcggtccttatttcggatcgcttacgactgctgttctacaatacaacaatcagtcaacggcagggacaaggtcgtctctgtgaacaacttggatcgacaacaagtagccaacaaggtcagtggaacgactgatgttgtagcgagccctggcaagttctgctaaaatcatctctaatcgcgacattctctgcttctttcctctcgaatattccgaaccaaaacaccaaccaacagctcgacctgatcctgtcttcgggaggggctaagatcaagcatctcaagaatgtccagctggaggctggacctggggcagagtcggcccgaggtgtttggagcggaattcactccgagatgaccgggaacggctaccgtgtatagagggcgtatcatgtaacaagttcaatgccgcattcgaccattttaaagaaggttgcccagaaaggtcggatggctatttctttcgacgggtgcctatgatgtcgttggcaagccacatgggctattgcatcaaaagcaaacaacgatcacggaacgatgccatcggatattcgggagtccagctaggcgaaattacgtagcctgacgggtcattcatttcgaggagaataccttgtccggagcgagatagactcgaggagtcttcttgccaccaggcagcgttttttcttttattcgcgtgtgggaggccatccttggaaatgacccgcgaccagacgtatgcgactgatcaagagtatttgccgaatgatactaacttccttagtagaagaccctccatgcccatcgttttctgatctcttccgtattgttgtaaacagacttcacgatcagacaacggctgcggcactcttccgtaagctcatcgctgcaacagttggtaactcgcactctgtgtgatcttccgaatgtatacaaagagatagagagagacattgttctaaaataaaacgaggttggttacccatctgagcctcaatctcgctgagttccagaacagtcccgtacgcgaagctattgccagaaggagacatttctgatcgggtcgagcagttgcctccttatataacccagtcgtgaatgaagtgactcctcctgagttcttctgaaagtgcagccaagacaacgccctgaggaagaagcgccggaaaaagcgcccaaatcgtctcatacgtgcaaggggactggaacaagtcagtgaacttgtttcttaaatctttttcgtgatgtacaggaagctctctggatggctcctccgtgtgggtgtaaatggctgtgtacggtgaaatatagctacctcacctttgccaggttccatgaatcatgaagcacaatactgcggtgaagaagaagcgtaaaaagatctatcgcgcagcgttttagacggttgtagcatcttgatgcttgatgaagggccaaaatcggcgtactgatgacaacctaaggtggcaaatgtcgtcacacatcagcatcgtgattgagagatgacagattgtccccgacacatgcagatacgcttcgtccatccaattggcaacttgttggagtggacggaccaagcccaatacatgtagaatcacactcggctgaactatgctcaggaatgatcaagccttggtacgcggcaagagagtgagtagactgcaacggttgggcgcgcgcttccgaccgatacaagcctcgacgacccaatgggacattggccgcacctctagatggttgtgcaatacaaacaacttcaacaggaatgtcaggcttttgccagccgagaactagagctgtaaggtctagtctggcctcttgtcaatggcatactgcccgtccagggacccttgtggggcaaaatggacgacgccgaccaggacgacgccaacaacgcaagacgtgacgcaagccgtctcatcgtgtggtgccaatctcagatgcactttctaaagcacgagcagcggtggccaaccagtgcggacgaggagcgggctaccagtgcagactatatgtatgcgcactggttggcaccgctattcgacgggtgccaccggttctcatatactctccgagggaaaacagccagcaagaataacaacgaggtgtacctcgctgatgaacgattcgacacggtcttttttcacctaggtaccgctggagagcgttcgcaccatcagtctcccgcatcgatcataactcgggccatgagagtggttatgcctctggcggacgtaccgcttgggaacgcttgcacggctggcaacctgacggcagcctctgcctgcggacttcgttcaccaaccgcggagaaagagagtaggttgctatgaacactgatcgtgtacatccggcttatgtgatacgtgctttacagtggatcgcccaaagctctcgagaggaaatggtccgattttgatacgcatactttgcaatggctggcgagatctcccaagactgccgccattatcgatcctgctcaagaggccgcgctggatgaggcgttggaccaaatcctcgggtagaacgagacgacggccgtgagggccaagatgaaacagagtttaatgaaaatgacgctgcagagagtcgggtgttttggtttcctattttagatgggacacacatgaccgatatagagtagtagtatttagtcgcgatgcgagatcacatcctccgatgattgttgcatatacttgtcatgtcgcaacgcagaagagattcaaagagcaaaggttttgttccgtccctcgcttgcttacggatgcgtaaatattcgctaaccttccctcactccaaccccatccccgagatcccgtgaagcacgcgtatttcgcaactgaaaccacagatgcacgatgaattgataacataagatattaagaagagtgattacgatctttctttcttgcacatttcttttttcctgtcactccgtccggttgtactccagctctccattttcatccagacttacttggggaggagaccgtcgtttcctaaccggcgcgagtggactagatctttcccttgcgcctgagctcttcctcctcctccttctcgatctgctcgtcgatcttagcgcctcttgatggttcgttctgaaaccagtacagtcagtacggctccgagaccatcgccatagcgagtgcgacctactccgtggctcttggcgagatcggtgggcctgatggcagctcgggcctcctcagcttccttctcctccttctcgatacgcttggcgtcctggatgttgttggcgaactacgaatacatgccgagtcagttcaaggttcaccatacggctggtccgaggtgctacataccgatcgctcgtccttgctaataaagcgcgagaaacgaaattagctttcagacaagagggaagcgctgaccaaggacttgcccgtccaaccgtccgtgagcaccctcacgtccgtgctcgaaagcagtctcgccggactcgtcgtggtgggtcaaggtgttgccggtctatgaggacaagcacaaggatgagtttgtatgatacggggaaggccgcggccgatctcgctcactttggggtcaacggcaccggcgttgtcgtgggcagaagccttctgagcttgatcttcggacatgattgattgaatgatgagagataggatttgtcttgagggaaagggggataacactcgagtcaagggattcttgagctagcaggcgccggcttctgctatataagagctttggggcagagcgtcgaggaaatctgatcccatcgtcgagcgtagacttgaggtgaaccgatgacgtagatcgtaactgcccccctcgcttcagcgttgtggatttgaacgcgaggccggctgtagcgtggcagcagcagcatcagcagcagcattcccgatcacaatcctgacgtcacgcatataaccgggtcatgtgactgagatttcccctctgcgtccccacagttgccgtcatctcgtctgcagtgtgctcaaacgcgtcatgcgcgtcatgacgacgagaggatgatcccaccatgacggcgagcaggttcgttcggtcagctgcgccgttggcatctctgaaacggcagagatgggtatataatcccattcatgacccaccacattcccatctctttcacatcgtcttgccacatttctctcacaaaccaatccccctactacttcaaccacactcaccaactctactcaactctaacacaatgtctgacatgggtcgtcaatctctcggtgacaaggctggtgccgccttgaaggttagtgcttggacatgttgacccgtcctccctgccaatcaatctgacctttcattccctcttcatccagcctgactcgcagaaggtaatttcccctatcataagcgctctcatatcgttctgaccttttgacatctttctgtccgcgtttgcattagtcttacctgtaagtacaattgatacacatctcgcggtcattgcctgattaaagtgctcattttgattccttcctttctcactacagcgaacaaggagttgacatggtcaagggaaaggctgacaacgccgcctcggccggtcagcccaccgagaacgtaagccaagttgggtatgcgccgacaccagcgatacctttggctgaccttactcggttcccgcttcttcccgtttctagaaatctttcacccagcaagccggtgacgccgttggaggatcctccaacaacagccaggggtgagttgcatcgccttgcggtctgcagtcccttcagttcattggctgacgcttgtaccccggtctcttgccgctactagtggacttttggactccgcgaagtctgccctcggcatggacaacaacgccaacaccaaccgtaacctttaagcagccttcaacgagttcgttgatgtcgatgttgggacagcagattgtcgttgtgaaattcctgtagcaagccactggcaccaatgaataaagaagatcaatcaaattctccgaagatgatgttgtggctgtggctactttgttcctcgatggggctctccacacgctcttcattcgtttgactgtggtcgagccatcctttctcagccctgtcacggatgtctcaattggcggggcgtatcaaagttggagggtgctgctgatcagcagatgtgaaatgaggctgcccaggcctctcgagtgagcgggtgatcgcatccatctgcagagtggatttcaagcaagtacacgacatcttgcttcgcgagctatgtgtgacgggcgacagctatgtgaaattgctattcgacccagatggcaaagaaatgatcgtatctatgatcacgacagtaatcatcaacaagtacatgagcgctgatccaacagcagcgaatccctaaagtctctccgaacggagtctacaaagctgtcttgcccctcacatcagtcggcgtcgctaaagtaagtcaacatgacccagaccagcaatcctccggtcaaggcaaacacggcaaagacacctccgatgatgctggcgatgaacagccagggcaccggttcgtcactcgtggccaagttgagagttccgtcctccctcatcttgacaaagtcaggcttgataaccttaccctcggcgttcttctgtggcttgatgagaccccgctcgaccatgctctcgtacatctgttgctgttttcggacggccatacgtcggcgctcgtcctcggcgatcttggtgtagatggtggctcgggcgtcaccggaatcaacatcgatggacgagctgacttgcccgttcgagcttccaacagtgacgaaagagggatagtggtgctcggcccactgctcgatctgcaagttgaccgcgaagtatggtcagccggatgcgcgggcaggacattgattcacaaactcggtctcacctttccgcaagcgatgctcaatctaacaaagttgggatctttgaccgataccttggcgtgaatgagtcgagcgtacttgacaaagcagtaggcaacatccctcgggttgacagccaagttcatgagctgcatgattggatcgagtgaacagcgtcagtctggggctcgacgtcctggttcacatcgacgatcactgacctgcacggcttcaccctttctgatcttgacgttcttcttcaaaacatccgggttcatgaaacatcgctcgagggtagcaatggccatgacggcggggatggcgacaaagttgaacacgctctggttcttcaacaggctgagatagtcgagagacgacgtggcgtgcctcaaggcgtccaggatcatctcactcaacgcaaagagagcctcttgctctctcgattcatcccgcaaatcgcccatcttgttgaacccgtacttgctccatatggctttgggccagaatccacgaccctcgtcgacatcctcgcggtagtccctcgtaatgttggtcttttgtagcaacaatcccatgtggttcgacaaggtcaactgatccttgatgaaatcccgctccttgccagacgccgagaacaggccggaaagaccttcaccaacgagaccggcgacatagtgacagtacaggtcgtaatcggcgatcgaatcgacctcggcaacgggctgctctggtgtggccaaggcggcgaaggcggccattcctcgtcccatcttttgcgtgatcgtcttgatgacttcttggtacctgtaagagtgcacgtgtcctgcatcagtcgctcgcccagcatcgactctgcgcgtaggcctctacctgcactgacttgggatgcagcctctggtactcctcgatcaccaagtcaaacttgaccagcacctctcggtccttttcgttgggtccactgccgttgaaattccatccgggcacgtcgagcttgttgtgaaagtcttcgagcagaggaagctttatcgagttgtcgatcgtcatgtcgtcttcgaccgtgtccagcgctcgtaggacgaggtactggagacacacctggtcataacaagagtcaagacgtctgtcagagatctgtcgaggatatacagcattgtgtgtgtgtgtgcttgactaaccacccgagcgagctctccgtcgagctccttgatcaccctcgagaacgatcgactcgttaaatccaacaacctccagcactctttcatcgattcccggtcatatccgctagtctcaaactccttggggtcggtgatgtccctcttgggatcacggtagacgccataggtgatgagcgaacggagttccgtctggtgcggaagatcaaggacgaacagacgagcaagcgaagtcggcaggacaatcagcgcttgctacaataacacgaatatcttctgctgctttactcacaggatgggttaccgctaagcgagagacgataaaggaacagatgtttatgagacgcagtggttgggaaaccgcaagacccgaggatgctcaccgagtttggcatattcgacgatgcccatggtttgttttgagcgggagttgaggtttgagaagcggggttcttgagcgaatcgattttccgagtagcaactagcagtagatgtatatatatatgccgatcggtagatttgaattgaatagattggttcggaacctcccgagctcctgacctagatctcttgctctcgattgtatcagagcgacaccagttctgctgcatggatgttcgacccggtctcacttgctcgctcgctgtcgtacgttccctgttccctgagcgagcgagcgcggccccgcgtcttgcatcctccctgtccttccctctgcccttgcccgctgtcacccacttcgcttcattctgcttccgcaaattcagacaccttccccccccatcgcccggcccggcaggttctcggtagcaacgcagccaccgccgcagtagcagaagtgtaatagtaactatcgctaggagcagatggtatgtgacaatcgagaaccaagtaggataactagatacaaacgaaatggagtcgcatcgaatgctcgtaaaaacgaaacccggcacgcgccctaagccggcggtcgtcgaccaaaggcgcccaagagttccctccgcaagttggcctcccggttcttgatctcgctgccttccatcgatctcagttcggacacgatatccttggtcttgccgaaatacacttctgatagcgaatttcgttgcttgttcctgcgtcgttttacgagggctcaagatcagcatggccgcggaacacgcttcgagcagggcaagtaggactgactcgacgtcctcgatcatcttgccgacgttgaccacgtgctgcgatggcatagttaccgtctggtcctgttcgacctgtttcagtcacacgagatgaccgtaagcccgcaagcatctcggctctcgagcgttgccggcactcctgtacctgtctcgtcatcgttccgctcaagctaacgtccccgtcaccctcattcaggatcgtcttgctcccgagccacaacaagatggtcgaagtgagcgaatactgcgcctgcctcgagcgttcccggacctcgaagacgtggatactgtcccatgacccttgttgtaaggtcgccgagggcagtgctatcggtcagggaggatgcatgccgtcagctccgcgctcgagctcgattacatgtccgtttcaatacggcttacccttcttgagaagcactacaccggcgaatccacctgcctccaagtcccacaagtagacagaagaactacctccctcgaagtacctttggcagggtcacgatgtcaggcctccgattcataatacctagacgtttcatactcgccgacttacatctcacggtacgtgtcgaacgcctcattcatcgcaacttccagctccctcagcgactcggaaggcactgctccatccgccagtgcaggtgaatacacgttagaccaaggggatctgggtccgaaaaggtgatctctcagcattcaagcaactgctctcttacaaacacataccctgaacctacctatagctttcaccatcccggttatagtcacagcacaaatactccttgccagtatctccgtcactctttatctgaagcggttgatcgacagagacggcgagatcctcggcaatgtccggacagagacgtgaaatgacgtctaggttggccgcgacattggtagggggtagccgacgcaagaggtcgagagctgctgaatagggatccatgcttgtaggctgatcggaagcggagagaacttaatgcgtgaatgaagcttgaaagaatgcctcgtgcgacgtcgtctccgtcggtagatgatgatgaatggttgcacggttaaacacccccatcctcctgtttgtgatctgtgctgtgggtctgtgtgattgatgcgtgatgatcgggttgacccgagcgatgccgcgtcataccgacctcggtcgcgtggaggttatcaagaaaaaggaggaagatagttttcaattgacaaagaatgcaccctgacgtgggaaaaaggaaagatggttcgtgccaggagaagatgaaattgcgcttttctttggcgagtcgaccctattctaagcgcgttttccacttgtgctccctgtgtcgctcctgccttgccttaccaacccctcgcgcgcgtttgcgcttgtatctccgaaacccccctcaacctcaaccaaccaacccacctctcagccagccaaccacctaaccaccctcctggcccacccatcgaccctcgtacaccacctggctcgacgagacggttcgaatagacgacttgatcaaagtcaaaccgatattcatcacgcatcgacctgacgacctgttctctcactcttccagtcgacatacaacaagatgggttgtaagcatcttctctggtgaacctggaaacacaacgtctgtcacggaacgctgacggttcacgacctgtttcttgctcgttcgaacccgtcaattatcccttcctccaacctatttcgactcgactatgtcttgcttgatggataaactcggcgtgctttaatatgacgatatgtgggaacagccggaaagcctcgtggattgcaagccgcccgaaagcttcgagtctcccgacgggacaaccgttgggccgacaagagctacaagaagcgtgccctcggtaacatctacaagacctcccccactggaggatcttcccacgccaagggaatcgttttggagaaggtcagtgttgggataggaattgcgggtcgtctaggctgttggcgaggaaaaggaatccggcacaaaagacgatagacggacgataggagggtcaaccagatggcacgcacggggtgaacagctgccctacaaggataccgaccggacacgcatcatccgtacaagtggataggatttcacccatgcgggacctcgatgctagccgccccggatagttcaccatcatgtccagcaccacgacatgacgctttcaagtcctaacactgctgtcatcacaatcaaccactggacacattcggaaagcgacacctttgtttgaaggccacaaatctcgacgccaaacgcgaccttgccagcagcctaacgacctcgctgccattcagctagattattcgtattgatcgttttatcgtttttatcacccctctctacaggtcggtgttgaggccaagcagcccaactccgccatccgaaagtgtgtccgtgtccagctcatcaagaacggaaagaaggtcaccgctttcgtccccaatgacggttgtttgaactttgtcgacgagaacgacgaggttttgatctccggattcggtcgacgaggaaaggctaagggtgatattcccggtgtaagtcggaaacgccacaggtcgccgatacggacccgatgctcatgcgatgcatctcttacaggtccgtttcaaggtcgtcaaggtctccggtgtcggtttgttggctttgtggaaggagaagaaggtacgtgggacgcgctcggagtcgacgttcaacctcgcctagacactaatttggccttcattctccattctaggagaagccccgttcttaaacaactcgtgtttacgaggaatttgggaatccggcttgggtcggcatcgtcactcttgcgatcacgatgatgtaccttcccgattgagtcgaccgtggccctgccactcttggctcgagctagctttgtcattgtatgattgcacatccttcacacatgacattactggcacgatacacctactaccgtctcaccccgtggctggacagtggccatgggatttgtaactgcctgtgcccgagtctgatcaaattccttgaccaagtgactttctgactgcctcgttttgtgatatggcttcgttggctgaccgcaaacggtcaagttgatgcacttcgacgacctaagtcaccacgtaaagaggtcgtccgcgtaacttcggtcgtcacgtgatcgacaatcgacatctcgatcgaatcggtcgatcagctatcagcgtccgtttaagagccatgcagatgtgtcgatagacctatgcgcaggtcttcgttgctggcaaccaggctggcttttagacacctgcagactcttccgtttaacagttgattccttgtgttcggttgccaggatgaggatctctattccgaacatcccgctgccatctgccaagaacccagcattcatcaaccctctagccgatatctcacattccgatgctgtcggtcgcgtcaagcgattcctggatcaaggtcggggtaagaccgtagtattgacaggagctggagtgagcgtggacagtggtatcagagcgtatagaggaaccgaaggtcattgtaagccgaagagcataccaacttgcaagttggcgtcctctgagccatctgacgtcataaccatctcaaagacacgcagaatccgaactttcggtaggcaacgagcagctcgaagtcctacaatcaagacccttttggtgctcataatcgtcttgaaatcatgtcagaccgatcttctatggagagctaatggatacgggtccgaagggagatctgtaccggtgagcggggttcgatttgccaagaccgttcgatgcctgatttgtcttgatctttgccatatgacagaaaacgatgtcagtatagtggctcgcctctacgtgataatcacccgtctaatctgactcgcaacgcttgcctcagattgggcgagatccttcatcggtgtatgtgggcgattaggaagctgcagtgtcaataattgctgactacgactcctgttttgtagtatgtccccgtcagaaaagctgttccgaaccctacgcacatgtatatcgcctctctacagcgcttgggattggcacctaccctgatcacgcagaatgtgagtttagacagtgggagatcattgggctcgatgcttaacgacgccgactgccatccaggtggatcgtttgcatcacaaggcatcggcatatccgctaacggaaacggatcgacggaccctggaattgcacggcactttgcactatgtgcactgtcccaaaaatcaccacgtcttggagcgtgatgagtggcagaaccttctcgcatcgctgaatccgcgatggcaagagattgtagaggaaacgcgagggcgaccggtcaagatgaatcccgacggagacgtgagtctgtcaggcttggtcgcacaaatctcggtctcagttttgacataattcccatttatgacaaggtcgacttgggagaggtccagtatgaccaatttgtggtaccctcatgtgggcaatgcgagaaagaggggatccaaggctcaatagtcaaaccgaatgtagtcttttttggagagacgataaccgaggaagtcaaggatcggtcgtgagtcactccggtatatttcctcatggaatcttggctgagcgaatcttacataggcataagatgatcgacgatgcctcctcggtattggcgatgggaacgtctttagcgacctacagtgccttccggtaagccgtacctttggagagatcagtatacgagattgctgacgggactacggctcgctcagtcttgtgaagcaggcagtcgatgccaaaaaacccgttctaattctctccaccgggccaacccgagcagatggcctccctggcgttgacaagatcgaaatgcgggcaggccccattctggaagaggtccttcagatgtacctaaagtgagtcgatgatcgatgcagagggacgatcgcatgtgccttaatgcattactaccacagcggccggcaaggaccggcttatgatcacgtccgacacctgatgacaaaaggcgtaatcaaggaagctcctacttcacgcacgcccccgcccgaggcatctagtgccggatcgtagcgatcgatgcagctttgaaccgatgatacgcggtggtgtatatatcatgctgagaataattcacgaatgagagcggtaatcttatggaatgcatacacaccctccaaaatcgtttatgatgtatccttgtcaagtgctcttgaccaaaaaacactattgcgctcgtggtttatagagccttcggctcgtcacttctatgacctcatcttcggcagatccgggtacgggttgtctcttctcgatgtagacgttgacaggatcgccttctactctatatcgtctgatctgctcctgacgcttcgtttgcgtgaccttggtctctttgtgagggacggcactgcgtctgggcttcttcgctggaggttctgcgtcggaaaggctgtgcgacggctttgacggacgacctcgcttcatcggttgaggcagtgggattggcaggaacttttcaggtagagtgaagaattggctctcattgacctcgacgggtgccaattcatagtgctgtcgtcagtcgggttcgttattagcaacccgtacatcccataccaatcttgactcgtcgctcaccgtcatgagctgtcctagatgccgcttcatatccacaagagcggactctacttccgcatgccgtttcaaagcgagcttctttgcaggtgaggagtctgcgacattctcgtgggcgtcaaccgatcttctggttaacccggtttggttcagcagcaacaactcgtctcgtcgctcccgaagtacttgtgcggccttcttgttctcgcgacgaagcctcgcggcgacatccttgagcaatttggtatcctcgttgctcctggatggcccgcttgcgacaggcagatcaaagcccatgttgccatccttctcaagggctgcgcggagtcgatcgatctgatactgaaggcgacgctctacgtccgcctgcagcgtgtttgacacatccggaaggagagccctgagaggtaaatcttgggctgcacttcgatcgacaacgggggagctgatgatctcgctcgatcgtggtccagctggcgggacagacccagcttgactctcgtctgtcggtcgcggacgactgaccgcctcgggattgtcgacagtgtaccccgtttgaaaccatagattggatgtttcgtccggtttctccttcagacttcgttcgtctagacccagcagagtcaaggcctgaattctttccttcaaggcgacattctcctctgtgagccccgcagccatcttttccaagatcgaagctcgttccacttttcgcaaacggctccttagtgccgctcgtcggttcgcctctttcctctccggtgtgatgagaggggcggtagtaggggtcgaacgcgaggatgcagaaggtttggccggagccgattcggtgatgttgagtttgcgagcacgaggtacaggagctttggtgggacgctctttacggggccgaccaggtttgcgtttgaccacagggctatcctgggggtcttccgccggttgaactctcgcagcaggtttcacgacattcatgtcttcactggcgctcgtattgcccgtccccgcagctttgccatctcggcgtgctcgaggatttcgatccagcgatcccttgggtcgacctcgacctcgcttggcaggtgaagctggcatgtctgcaactgcaccgtccgtcgaggacgaagcttctggcgcctcatctgtgcggatagcatcgattctcggattggtccctagagttccgctctccgacacgccggcatcaagctctcccaagcggccagtcagatgctcgccagtgcttgccaaggcaagcgtgatcgagctcaggatggaagcatcggacaatccctggcccgtacgtgcgttccggtcgtcgacaaggtaggtaccatcattcttgtcggtcgcgttagtgtttgccagccaggtttcctcttccatctgacttgcggagtcacatattgcatgaaacgcagctcagcagattgacccttttctgcatgacatcactgaagtcgtggctcacgttgtttgtgtggtcgtttggtgttgggattcgacaagttgaaggatagtctatatgtccggtggtgattgtcaaccttggatcgaatgggggattgcgatgaatcgagagatgatgtgttatattcctttgagaatcgaattgatagccgtgagcgggcggggctcttcccaaaggctgagtgagatgagcgttctggtacttttgcagtgatgatggttgtttatttaaagaggcttcaaccgtttctaccttggctggttactagagccgcaggggggtcaacccatattcagtagtggtcagagcgtgtcccgacgaatacaggaccattcggtggcccgatcacaaaagcaacgtctagcaaagacagtctctcagctacccaccgccgtcagagtgagttcagccgtgaacgtttgccatcacgatcgctggcccgctaaagctgacagaacgctttccgtccaccggccggtagcaacactcgaaatgactcaactttaccgagatccttgggccaagcgggaggcatggcgaaagtcccccatctttcagaacaaggccatgttcaggcaagtcgagctacggccttcccatccccgtcgtcccttcccgcatcgaggtcgcgcaagttggaagttggaatccggagctgatacgaatcgctttgtccctttctggtctgcaggaacctcttccccggtttcggatggggtctcggagctttcaccctctacgtcatctacgatgatttcatcgccgccaagaagccttccagtcatcattaagtaacgacaacggagaagagattgatggatgatatggatcgagaggacctcggcgagtagcaagtcgaggtcacgatatagatgggggacgggaagattatcgttcggatgggagcaggagaagaagagccgaagctgcgaggatgatccgttcgtcccagacgtcgaagatactcggctacgcacacactcagtcgaaagccaacgttcagtgctacacaaccggcatacgctacttgaccgacccctcgcacaggttgatgcgatgtaaacaatgctgtccgccgcaatgtaaatcgaaaacaaatgaaaaccgggagagtgtttcctcgatctggctctgatagtagcgggccgtcgatctgatccaagtcgagcttgacaaacaagtcgttgaaccgtcgagcaggttaagcgatcccgctgggtcgatacgccgatcgtcatgatatctagtgctacaatgctacaggcatgcccaccagccgctctttgggcaaatggatgatgattgccctacgtttatgcttgaatctgctgagcagcagcctcggccgcttgcgcctgtccctcttgatgtcgtttcctcgctcgatcctgcttggcctccatctcgtgccattcgcccttgacctcggcgatactgtagatccaggtgaagagcgagtcgctcatattagcttctgggcgcggatacgctgttgattcaaaagagatccgggacgtactggctgggcgtctcgggtcgcggcagctcggtcacaaagtatggatctgccaaggcctcgtctgccgtcagacggcgagctgggtcgtaagacagtagaccttggattaccgccagacccggtgcactgatagttctacaaatctccggatatcagcgaggctttctgagtgtgtgtgtgtcttccttcgcgagactgctagtaaaactcacgaatcaaacgcgtccaccaagcgactcgcatattccaccttgggtttcaccaactcgtaccaaggcaaacctcctaaccccggccaatcccgcacatgaggtgttcccatcatggtgaagatgacctcgagctgatggatctcatcagtaccttgaaagactggtttgcggatgtaaagttcgagcatgatgcacctgaagggaaccagaatcgggaatcaatcagcagatggctaacgagagggatcaagcagcttgactacggctcacccagcactccacatgtcaaccgaagcgccgtagacggtctctcccatcagcaattcaggactccgataccacaaggtaatgacccggttggtatgatcattcctcttcttcttgttgtagaaccgagcgagaccaaagtctgcgagcttcagtataccctgactgttcaacaggatattggagcccttgaggtcgcggtgcaggatggactttcggtggaggtatgataagcctgaaagcatctgctgcgacaaactcttaaggtgcccctcgttgaagtggaattgagcctgatttagtaccccagtcaggtcgtgctccatgtaatcaaaaaccatgtataccgagcctaagcaaagcagcatttcaggatcagctacttcgccagcctacatagtatcacgctgatactcaccgtgggagaccatcatctcgtgcagacgaataacattgtcgtggtctagaccctgcagcaatttgatttcgcgcatcgcagtgaccggaaacccgtccttctctccctccattctgatccgcttgagcgcgacaaggccgagaccttccctgttcctagccttgtataccttgccatatgtgccttctcccacctgaacaactttttcgtacggtttgcctcgcaaaggcttgggctcttcgatcaccggcggtgtcgccgattctttcagtggttcgacggtctttatctcggatcgagccgcgtcgaccgctctcgtcgcatgatgaccattgcgccggacgttgtctctgctgtccttctcgtgttccctacgcgtagatctcctatctggcgtcggacttcgagagcgacgccttgtccggaccggcgaccgcgatctcgaaggcgatctgtaatgacttcggttccggtctatcgaccgagaccttgctcgctcacgccgccgcgctggagaatgtgacgcagtgggagatatactccgacgcgatcctttgctacggctcggagatggtgaccgcctattcgtagctcgctttgaagtccagcctccactacgaagcccttttgtgggagattcgtcaccggcaaatgttcgacttgggccctccgggcgatatccgatacgagcaccatcggtgtcttgccctctggacgttccaattaattcgcgctcccgctcctcgagggctttgatgtccttgagttgcttgtgtagcagtccaatggcctgaatctcgtggtcttgagggtcgcggctgaagaaagtctgaagcaaaacggccacatccttttcgagcgaaggatctttcttctggatcatagtcatagccatcctcatgtatggcaacgtgttttgcaatagctggtcgtaacggctgtgatccgatcggagctgttgtctaacgtccagtagttccaagttagttggcagttgctctcctgccgctgcagtccgtgattcctcgtttgattgcgaagcgagcaagcgatctcgtcgaggctgagtaggcgtctttttcggtagggctatactgacaaagtttcgctgaccaaccaaagctcctgcgtctgcgctcgagccctgcgagggagcggtctccgctgccgcagcgttatctctacgatctgctgcaggtccagtgggtatgttcatgcctgaaattggccgcgaggacagctcagatttggcgatctcgcttcgcggccccgttggcgtacggccgcgccgctgtcgctgtagccgaggttcttgtgggggcaaagcctcgaccactcgagcgcgcgcatctgacacatgtgatcgatctccctggatcgaccgagtctccggtgaggtttgcctcaggtacctcgcagatccggtatctgcgatagattcgagctcacgggcatagcttttggcgtgtggatttggagacggagccggagctggacttgcaggcctcgagttgcgatgcgaatcatactgactgtaccgtacgtcttccgcatcccgtccgtatccgtttctttcggcgggacgccggtcgtagggagatggcgatcgacgtctccgtacgggggacggatccctctccgctcgccggatcgatcttcgagatcgtgcaggagaaggcgaccgggacgaagctgatgacaagcttgttgcccggcgtcgcgtccgacctgtagacgccgatggcgactctctccgctgcgcgatttttattgatgtctcgcgatcgtgtcgatttcgcgatggcgaccttgatggtgatctccggttccatctgtctcgctccgcataaggatctctctgcttcccgtgttcagcagaacgatcgcccgttcgtgggaatgcactcttgtcatgcttgctcctcgatccgtacgcattgcgaaccacgcttgcatgaaattccgtattgtccgacctgcgtgtaggctcttccctgtccgttacccgacgcggttcctcatcccgatcgatcgaaaccctcggctcctgcctaactcgtctccaccggtcccatcccacagcagccgaagccgtcgaaggtgtcaggggcgtaggtgaccgacgttgccgttttcttgactcatcgtacccttccgccgaattcctctttagaggactctgcgttgaaccgttcgtagcaggctcgtctgccagagcaagtgtcttcgaatagtgcctacgttcctggactgccgatgaccgataccgctgggaatcaccctcgatgacatcacccgcgtcatagtcaagatctcgtctcgagctgccagacgctacggggttcgcacgacggtaagactggtcacgagtatcgttccggggaggatcgatagaatacgtgttcgcgtcgcgatctgctcttcgatcgatctcaaagttgtctcgtttgttctcgctgcgctctccgtaagacctgcgaaaatcagaggtagatcctgattgaccctggtatcctctctctacatggcttgaattataccgagcgtccgtccgatctttcacaggctcgggcgatggagtccggtgctgaggcgaatgatctcgttctcgatcactccgtgattttccctttctaccgaactcgtcctgggtttccagtgagggcgaccgaggtgacctcttcgttctctctgtgtctcgacgagcatcactgcgaccatgtgctctgtttgacctgtaatcggatacgacagctgcctgttcccggcgctgtatccatcgatcatcccatttcccagagccaggagcgtactgtcgctcacgcgtgcttccctctgtgtctgccttgtggccataacgagccgtcccgcctgtttgggcaaatcggtcgtcccgcctggcatctgcagcaggccgttcagaagaccgtacggcttctacatcctgacggtgttctgatccagtcctgacgtcttctcgtcgtttccaaccttcatcacgggcgaacgtttctggctgtcgatgtcgatgcttccaggatgacatggtctacgtggtttctttagctcgatttgtactgaatatcgttcagatctcctttgaatttgcatgcatgactcgatctgatagtataggatgtgaatcgttttgatcagcgttctcgtcctatcacatgatgtcacgaccgctatgactcgagctcgcagacgtaggcaggtcgactcactttacgagctgtcccaaggtgttgcaatagggtgaggtcttacgcgatttgccgcagagttgccgcagagtcgtgcagcggtctcactactatactatttctgctagctcgatcagctcccttcgatttgaggtctcgtttgaccaaaacggtgtacatactttccaccgtcatcagactctacataccgtcgctcatgctcgctcaaggcgagttctgctacaagttacgcccaacctcaagaagcggcgacgcgtaccgaatcacgtaaaggggggaaagaagaggaaaggagtatgggtcacgatggatgactcattttattcactctcgtgatgccctactatccattcaaagggatcgacgatatagccggtgctcaccgaggtcgtacagctcggatgacgtcttggtaaagctcacatcatcgtctcgctagacagtagtagtgtgacatggtatacatattaatacagatctttcttatgacactcacatcacctcgacatgacagacagtattagagccgcccagtcgcatgccacaatcgacgaatccgatcgtccgatcagacgacggatcgcctacccacaacttaccgtgctttcatccatcgtcgagaccagcgccggtcgggacaagacgctcaaatgcgtgcaatatggtgccagaaactacatgtacatgatcaaactactactcggcttgcatgtgacgaagcgaaatcacatgcaaaggctagcacaggcggtcgggagcttgtcccttgcgaggttcgttcacattctacgcttgacaatcgactttttctccgactgacactatgtcgaaccgcctcacattattcgaacagaaaatgcatgatcctattctcccctctaacaccactcatcttgctgctacaatccgactcgagtacgccaccgaccagtctcatagcgtcctttatcgctctcctcaacgggataggtacgcgagcgaaaatccaacgaccagcacgaggtacatgatcactgaaatttccaattttctccttctcagccgacgatatgttctgtctgtctagacttggactattgagcaagagacaaggcctctgggctgacaagtgggcaaagtgcgcaacgtcaacccgcccgctcatcgtcatgcagatcagctgacaagataccttgccccacagtcggttctggttgatgaagagcgtcaatcaattttacaagctggagatctctcgagcaaaatctgggacggacctggtcgagtttgaaaggcgcaatcggtggacttataggaaactcgcttgtgatatcatctttgccagtgagcctggcatgagagttccttggagcagcgctggatgtaggctgactctgcgtccgatccctggatgataggttacacggtcttcgatatcaccaagcaaagagagctcgtacagaatgtgacgggcctggttgccggtctgatcaggtgagcgtcctcgccgattttggacgtgatcatgtgaacctttcgctaatttcatgcctcgctcgttatcgatagcatgacgcaattgtacgacacgcaccacacgaaattgtattcgtttgtcaaatcgcaataatgcatgcatcgaagttgttgtataaaatgaaagagaccagttgactcgaaatcgaagtgtgatacaaaagggttggtgtataaacggccgcggccgaggtctaatccccgttcgacctagaatccggcatctggaccgaaaccttggcgcaaggccatttcgatctgcagcgccgcttgtgctgccaagtcatcttcttccagcggtggagggtgtctgattacattgtcgatcgctctggccaattgttcaatcttggcagcgttcaagcaacccaaagaaaagcatccatctggtaacaagtggatatgttcacggtaacctaggacttgcaattgttccgtagtcagcaaagttgtactgcgatacaagcaagaagcccggggtgagcgatcgaccaaaaaagtgtcaactggtgcaaaacaccaaaacccaccagtacatcccctgggtcttgcggatgtgcgaccagtttccgggtgtcttcaaccgattcgttaactgatcgaacaacttgtccctgatactcttcagccgatctgccatggccttgacctcctgcgaccaattggtataggccgtctcgttgccgaggatgttggcggcgacatgagcgccccagggtggaggatgcgcgtgcatggtgcgggatatggatcgcaactgagattcaatcctcggcttatctgctgcggcgtttgtgaccacggataagatagccgggctatcagaatagagtcccatcgcctacatgtacagtggtcagttccgggaagaatgctatgtcgatcactgacagacctgactcacagcatcgaaggtctgggccagaacgaggggaattcgtttctgagccatagtgcgcagtggctgcgcgtcgcgatcaacattcccactcgagaggccctggtactccataatgaagaacggaatgtgacgttgttgctgttacacgacgaaagttcagcctaagaccccatagtcttacgtacacctatcgttcgtgactcaccttgatgacctctgtgatcagccgccactgtgccgttgacaactccgcacccgtcggagtgctacctcccacatgaagcaggacgatcgactgagcgggggcgttctgcaaatcctcgcgcatgccctcccaatcgacactacctgtccgcctgtcgaagaatcggtacaaatgaatctcgaggccagagtctcgaatagcgaaagcctcctcttcgacggtcggatttggtataaagatcatttttggtgtcggctgagccgggaaccgcgacaagaaggtcgatccgatccgaagggcacccgtcaacgacattgcttgcaccgcagcgatctgcaatgatgtcgaatgaattagaaatgcctcgattatacagttcattgagactcactctaccatccttgaacgcatggccgtctttgccatacgcgaatttcaccccgagatcgaggaaaggcggatgaccttcgatcggtaaagcatcgtgcgataagccgcctcgcatatgcatcgaccgttcgaccgatcgcgtagtaggcggaacgaaaatgctaccgtcatcctgtcgaaagcctgacaggccaagattgagcttgttgtgacccaggtccgtcatgaaggaaatcgcaacctgctgattgctgtgatgaagatcaaaacgagtcgttattctccagtggattatgtatggcccgacaaaccacgactcacgtttcgggtacagcttgcggaacttgactccatagctcgttggcaggtgcagcggtgggcggcggcgcaagcaggttgctcaacagcgatgtgttttgcgcagctgttccgccattggcgagctgagagatcatgtccatcaacatagcattctggctctcgtcttgagcagaagcttgcgggatcgcgggaggtgtcatcgtgcttgccaattgagcaagaagagccgagggatcgctcaaaatattgctcatattgatatccagcccgttaccattcaggtcatctgtgtaagcagaatcttggacacctttcgccaacttggccagctcagcttgcaggttggctgggatgttgagtgtgccagtgtctctggggttgtcagccttgacttgcggcgacagtggctgtacgctctctggctcttgtttggatgaggtaagttcgcgcagtccgtcacccctggcaggtatcggccccccgatagaattgctttctggtccagagtcaccgtcagccatcgcttcgtccaattgttgcctctgaccttccaattgcgagttggccgtctgatcgagagaaggaagctccattggcttgtctaatgagccgagaagtggcgacgcgaccgattttcctgaggacgaatcgacccgtattgactgatgggcagagtcccccgtggtttgaggctgggaaggctccgttaaggtctgagagacagcctctgagactatacctgtgacatccggaggtccttccgggattgctgcaggtggtgtgtcgatctgcatagcgtcatcggtttcgacgaccacaggctctgagcctgcaatagattctctcgaaatcgtaaccggcgcggtcgaaccaggtgtcggtgcaacaggtggtgaaggggcaggcaaagttccgggcattgtcaaagctggtccactagcggcgggtggaggcggcggcggggttgcagtaggggagtccggacggatgtctttccgaatcccaggtgagcctaagggcagctctcctgcaataccaaagcccgcgagcacgggatccaggctggtggccgattccgcaaccggcggaacagagccagggcggaatggcgggtggggaggctgtgtggcaaccgcattgctttgctttttcgacgtcgggattgccacagcggaaggctgacggatcggcgacggtagtcggtcagactgcattggcgaattaggtgcagacatgccctgctcgaccttgatgctgagggccaaaggttttggcactggtgccgttttgggacttgaaaccgggggtccaggtgaagactgcaaggatgacgctgaaggtagcattggccccgtcggcgcaagttgagtcagttccggtaggcttttctgcgcctccaattccagttggtgctgggcagcctgagcctggttgatcaggcttatcacagcctgaacttgattctgcatttcctgctcgtctgccgttggcatctcggacaatggcatctggagactggaaacgccgttgaccagactgccattgagatcgagatctgcgaaagcagccggattcgtgcgcaggagatcctccagcgcccggactcgcgcattccagtcgaatccaggttccgacatggcttgtagaaaagcgccgtcatcacgtctgtggcggacagcagaagcattagtcatttcgccagcgagaatgaatacgtgagtacttgctttcgtttgtttttacgcggcggcatcataggggcctccatatgacacagttcgggcactcctcgcttgacgctgcgccgtgtagaaggatattcagacagagcccacgtagacaagaagcgacttcgacataccatctcgcacatggaatattccggtcgcactgtacgtcgatcgtgttagccagattcgatgtattcccttgagcgacaaaatccgactcacttgttctgcgaggcaaggcaacgacacgagtaaagcatttgttagcagccgtttcaaacggtccctcacgtgcgccgatcttacgcttctgcaaaacgcaaccgtgtcagtgtgttctcgtcgacgatgataaagattcaagcggtacttactcttctatgacattcagtacaactcctgcgagattatagcgcgcagacgtcagcgatctcgactggcatgaaccggactctttgtactgacaataccagcctgttccttcttttcttctccttcttctccgcaggtgtttcgttttcctttcgtggtttgtcgtcactgatgctaggcgctggcgaatcctccatcttgtagtgctcgggatcgagctcgtcctcggattgacccggatcatccttgttgtcttcgtcgcctggtggcagcaaagcgctgatcatggctagcaattcttgcgcttgtgacgccggatcgtcgtcatcatccaactcgtcaatctcttcgtcgaaaaccgcctggagatccgagtctgtctcgcgctcgggcgaagatcgactaggaccagccgccgcattcgtggtggacgttaacatccccggaccctcatcctctatccgatcatccagcgcagcaggccggccgagtgaggctgcggcagcggcgtactgtcagcaatcgatgtctcgtctggacagcgcttgatcgtgaaccaattccaaactcaccgacaatctcgtcaatctgagcttggctcagtttctcgcctcccgtcccatccagcatatctccgttgatctgcgacatgcccggaatcgggatagacaagatatctgcaaattcttccagaccgctgacattcaggctttcggagctgctcccgggctccaaccgccgccttttattttgatgagactcgtctggttcctggggctgaggcggtttcgggattggttgcacagcgagttgagagagaccagcagaaggcggtcgaggtgcagtcgcgaatgctggacgaggcccgttgacagaaggtggtcgagggccgttcgcagagggtggtcgaggtccggttgcagggcctggtcgaggtccggttgcagggcctggtcgaggtccgattgcgggggctggtcgaggtccgattgcgggggctggtcgagggccggtcgtagcggagggacgagggccgtttagaggagccggtcgaagtccggtcgcaggcaacggccgctgcgataccgtagatggtggtcttcgcactggagaattagaactcactcccgctggtgcaggtcgctgaccaagagttgaactagatggtctcggcaatatcgttgaagctgacggcctaggttgttgaagactagatcccggaggtctgggcacggtggacggcggccttgcggggccaatgaacggaggccggggaggagtgccgggcggccgcttcaaagcagaagatggtatcgaaccagaggagactggccgtacacccccaggacctgccatagctggccttccagtgacattcggcacgggaccggaaacaggtctttgcgagagaccaggtcggaccgtgctgacagcaggtctcggcgcagaacctgtagctggattcggtggaggagcgggtcgaggagtagaaacggattgggctcgatttgatacaaagggtgatggccgggtggggggtggtctctgagctgaaggtacgggtcgtggtcgcggggtcgtgatcggcctcggtccggtgggaatgccaggacgtggcatggagggtcgaacgttcggtgcggaagaaggaggtcttgccgccgaaggaccctgaggcctgggttgaggaggacgcaccgcagcgggcaccaaaggggcactacctggtcgggttacgaggaggaccggtgctgctgcggatgctgatgcaggagtagtggattgtgagcgtatcacactaggtgatgcagctacagattgtatgacggccggtttatctgcgtcgggcttggaaggtaacgaagttccggcagaggcattagagataggggtaatcgtatctgaaggtggtttgacctctgcaggggcagggggtttcggaatttcggaagtcgctgtgacgagcttgttgtccggtacactgatttccggtaaggcagggctatccacttttggctgtgaaggcgtctcgtccatcttcggcgtcgactctttctgatcaggtattgccgcgggttctagggacggccgagccgaatccagtagtcctacatccgtcggaacaatgcttccatcgacatcgacgatgggttgagcttgtagaggtttatctgtaccttccgcaatcatctcaggcaactggaaacccggctcctcgaaacttggcgagatggaaggttgtcgggaaagagcgacgaggtccctcaagagagctgcctgatcctcctcgttgaaatcgtccagcccgacgtcaccctgcccatctccttcaccgattccagaaccgatcatctgcatctgacccacagcaccgaggatgtccaggtcgatctgctcggaactcgattcgttcagctggtccaggaagtccgagctgaagaacgaattgatcatgttctccgtctcgtcctgtattccgcctgtcgagcccgctcctagcatttcggggttcaacccatttccttgctcagtctggttgatgatcgcagccatgagatcctctggcgccgtgttcctaaaaatgtcggtggttgccgactgcaccaaagagctcaggtcgtggtcgtcatcgtcatcgttgagcgtcaggtccatggcctcgttcccacccgtctctccatccaacccagtaactcggccttgttcgtcctgttctctttcggcctcttcctggagttgacgggccaggagttcgagctgcttcgaagcccagtcctccatccccaaggccaactcggaaacgtcttccatgtcgacatccccgggtggcacctcggcgacgatgtcatcggctgcgggctccagaggcgttacttcctgcgtcccttgacccttctctcctgactccacggatacggggttcgaggagggagaggtgggtgacatgaccgacctctacacctcccggatatcgaccttgctcgagaaggacgcgcgcgcgcgaggtggtcgaccgagaggagcaatcgaggtggagagggagggctatgtatgaggaacgagcggcggtatagctatatagagtgacatgagtgccgctcggtgttggttgtcagattgctactagatgttgatgtgttatcggagcgaattatgtgcaggttgtgtgtgtgtgtgcatcgagaagtctacctctggcttgcctctttcgctagtagttgagtgtgtattcagctactcatgcttcccgcgacgcgaccgagccaagaggacggcgattttcacgtgatagacccacatcgatcaactaacactccccccttactctcgaccatcatctcgaccagatggacatttcgatgctttgatccatgatcgacaaacaacgtcagatccgcccaatctagatcacacttcacacgcaccaacgcatatccagtatgccttctttcagactggccgccgtgtctctcgccgagctgacgccgagggtcccctacacccggggcgtcttgcaccacgctcgacccgctcggaaacccgcattcccttctcccctcgaccccgtccaacctaaacctaccgcgggaacctcgacgccgagacctacgccttcatcaccttcctcctcttcgtcatcgtcgtcgtcgtccacatcaccaacaaacgcatcggcgaggttgcaggacagcggcctcgagttccaccacgcacctccccctgccgcgccgacctacacgacggggatcctcccggacgttcttcgttgggctcaaggatcgagcgatgtcaggaggagcgcacaggcaggagctcctttggtcaggcagaaaagggcgggtgggagcgaggtcaagcatgatctcggtttgagccaagaggtcgtccaggagatctcgaggttgaggctcgaagatcccgtcaagtggagcagaaaggcgttgtgtcaaaagtgagttctccccagcgttacatgttgacatcgtacccgtcatacgctcgtgtccctgatcactcgcctcgggtcgcttccgcaactttcaggttcgacatcccccaaactcaatcatacctcctcgcccgtctatctcctaccccccaatcgcatcgaacacgtctggaagaagaactcaaggccaagaagaaccgatggggattcaacaagagcgtttctcgggaagcgagggagttgaggaaggggttgtggtgaggttcagaacgttggagattgtgggatcttgggaaagaagggttgtagtcggagacgaacaggacgagatgcatgagtttacgacccgtttggtcacatcaccatccccgttggactaagcaagggatcgttgttggatctatttcgatcgttccttgcgcacccgtcgccaactctcgaccatcgtcgagtgatttaggtgcaccctggccacctctgcttcacacgtgacgactcggctgagagaatcaaggtttgcaaaggtagttaccaaggtcgacccttgcctcggcaaagaagggatgcgcggtatcgcaacatcccgagtcactgacggggttaggggttagacggcttcggtcatctttctttctgacctcgtttcataaaaagataagacgccgtcctgctggccctatcaatctcgggaacatgttttgtaaccgcgacagtcatggcaacaagcgagtgaataagctagtcaacaatccttgcgtgttcctccacctagccaaaagcgcatgttcctccttgtccagtcttcgcacggatgtccaaccctatgtgtactatttgtcgatattcgtcgctcactgcatctcacttggtagttttgatctggtcacaactttatggcagccaagttccatgctttgccttgacacctgtcgagacatcgctctctgcctgctggccttttgccttggtgggcagctctcgtgcgcgtcgctttggctgatctcgggaacaatcgattcaaaggaccattcggacgatctgaaacacgcgacaagcgaagcctgtttgttcactgggcggctcgaggacggccgagacttcctttgggaaacgcctgattgccatcagatcatagtcccccgctattttgttgttctcgcccgatcaaagattattccagggtgttgtcgtttgatggaaggacgatcaggtgagaacggcggggccgggcaaggtatataagccagcctctgtcgtgccatagtcaccagactcccgcgtctcgtcaccttcaaacccgcatatatcagtctcttccatcgccatactcgtatagacgcacttgatgatccgtgatctgcacccatgtgcatctcgctagatcatgccgaaaccaccacgccctgagagggatgacgaccaaggctctgaagcctcttattactcctattcggagtacaccgtccctgcctcggaagtctccgtcaatcgtcgatggtacaaccgactggacagttggagaaaggacatttctccgaccactcccaagaacatacaaccggatcgactctcgccactacccccgtccaatcacaatgtacgtcaacgcgggattgacagcagagcggaagatacggcgtcgacggtctctcccaaggaatcgatctcgtcgcgtccaagtccgagaatcggacccgtgacgaacccgctgcgccctgtcccatctattgaacaggcggcgaccttgttgagggaagaaccgaggatcatgcaggacggcaggatggacacggtgagagtgtacgacatgggcgatgggatcgaggcgagggtaattccagaggccgtcaagagggatccgacgcctagagataccctgatcgatgtcggtaggaatcatctaggactcatcccccggaccactcaccaagacactcacgctcgatacgatgacatggcgagagctataaggctaccgccctcagaagggaccttctattccccacgagcgagtcaggcgggtaaacttggccccattatggagccttaccgcatagaaacaaccgaatcgatggcggacgcacggatgaggattgcgggatatcaggtcgaggaagacggaagacgtcgtacggtggtcgagcgggacctacctcctttgcctccttcgacttcgaaattttacgacgacaggaaacagaggccgcaatcgcaacagtctcgccgaatgcccccctcttttgacgatacccggggttctagtgagccgacctcggatctggtggcgtcagctcgtgagaagaattcggtccagtaccggccagtggctcctgccaactcggctgtcgtccgactggatacgattctcgagaggcgtcaggacttgggtgatgacaaggagaatggaaatgcgaggtacagaaaaggaactccatatccttcagtcagaaacctcagtccgagcgaagccagtacccgggtccaatcaggggatagggagtcaacgatacaggtaagtcttgggggcagatacaactagatccgcgatgaaacgtgttaatgcatacgatccagcagcgtgttatcgaggaaaccacccgcttgcaagagagaccctctcgagccgcccgagtggagacatatgacccggacaaggaagagcaggcgactcttcccgtgcccaggaaaaggtaccccgatccagctcctgtccgaatgcccggtggagggaccatcgctcgatcggtcgtctcgacacgggtggtagaggaggttcctatggttgatgcgagaccagccatctcgagagcggcctcgaggaatacggtcagatcggtggggaagtcggtgtcgcaggaaactaccaccgatggcgccaagacagatagaccccgatctaccgttcaacccgctgtcactgtagtccaggaatcggaaaaggccactccgaagctatgtccggcttcgagatcgacatcagaagtgaaacattcggctattgtagagaaagaggctgcccgtactcatgaaaccgataatcctccttcgacggacaagccaccgcgaaaggttcacaaacttccgtcagtatcgtctcaaaaatcgcaaacagcttcgatcgtcaaactctcgccgcccagcgccgaacccgaacccgagccactcaaaaggagcgcggacttgagagaagcgaaaccgctctcagctgcggaaatctcccctgacgatcgagcgagggaatcgtcgcacgggagcgcctggacagacactatacttagtaccccagaaagtcggcggcggttggccatcgaacgagagcaaggaagtgatggatatcgcacaggctctgacacgggttctttccggcgtgcgaggagacgatctccgtcaccccctcgtcgtcgcatttcggtgcaagggcacatgggctatccgaatgcgaataacatgaataatatgcaaccaccctttccaacacctacgggtggagcggtcatacatcccccgatgatcggaccaatcatgccttcctaccggacgatgatacctcgacctcatgttatgcctatggtcccgaggacaagaccggctcctataatgcctcctcctcaaccacccttcggctggatgagcggcatgtcgcctccaactcccatgactggatggatcccgcaacggccactgtcggcaatgccgccgatgacatcgatgcagaacagagcatccttctcggcacctccgacatcgatgggtgcggtcggagttggaggaatacgaagtaccggcggctttatgagcggtcaaggactagcgcaagggagaaacggacgagataggacgggcaggtgagcactaaatgcatccggaattcaagtcagtcaactaatgattgcgcggcaggtcgggacaacggcgaagctctacaaacagacccggcttaatcgaaccgactgccatccctcagtcgagcaggagaagacgatcgaaccctagtccagctggcggcatgcctcgtcgttcagcaggcgcgcctcgagttcccatcccccgtccgagcgccagaagacggacgaacgacgggatgggcaccagtggaacgaacgttcgaaggcctagcggtgcgctgccgaggacgacgggaagaccatcaggtggtcgcactagacccaacgaggtgtccagggccggtgcagcacaggacaacccagcaatgaagagttgggtgaggaacgtcttttcgatgggccgtaggcctgagtgatttacgttatagcgagaggaatttgcttagagcctttttatcgataagacatacatatacatatgactgagttaataatgttgtttccatgatgatgacggtttgagggcgtgttgaaataaagcgaaaacccggcctgtcttaacaaagatcataggtcttgttaagcaattgcatctcatcgaaagcggcttggtgtagtggaagcacgctgggctcatattactagttgatggaacccagcggtcctcggatcgagaccgagagccgctactttctttttgccctggcaagacctgttttgcatgcgactcccgtcgggtatggccgaagccttgtgctgtctatcgatctcaccttccttgcagcagcacattgcatttagggattgcaaagacgttcaggttgttaaacggtggacttcttgcatgagataccgggcctgatgcagttaggtgcagctcgaaacgaggtaacctctgtgagctatctaagggagacgaacgatgtagatacgggcggccgatcccgacctgttcatgcattcgatcatcgtcatcgcccgtaagcaacttcgcgcgtgaaccagatttggctcgataagcagaatctcgtggggaggggggcaaaggggatcatatggtgcacaaactcggtctaacccatgacctttgtggtcactcaaatagctgacaggctcagcatctacattatatagatggctacgtcttctagtgacccacgtcgatcaagaactattgccgttgcctgtgataaggaggagtctggctcaagatcgaggaatttattcacgaccggcccgccgtctacacctccacccgcttctggccgaaggacctttaacaccaagtcgtatcaaaggcagactgatcgagtcgatctcgaagcctctcaaataccatgcctacctcagtcaacaaggatcaagggaaacagtctctcttgtcccctcctccgctacaacggaacaactcttccacatctacccgatcaagtcgatcggtgcactctcagcgagctcatcgttcccactactctctggacgacccgtcggcctcgattgtcagcaacgccatgacatcgaccgacggacagcatcatcatttacatgcccaacatggagacgtgttcgttcccgtccacgggggaaatacaatgcctgatttcgactcgctcgtcgcagccgagcagagagagctgatggaggacgaattggaagatgcggaagcagaggccaatgagcgtacacgattactttctcatggagagaggaggaggtcggtcgctttcgactctgaagctcatgccaagtccggcacatccggccgacctcgggactattccggcctacacgcagatgcggctcaggacagcgtgcatgccgaaagcgatagcaaggtcgagcgggaagataatcgtccggcttggaggaagccgggtcttacttggtgagtacacaaatgagctgcaacacgctgcccatcttcaagcgttatgctgatctgacacattcgatcgctgatctttcaccaggctgatccccgtcgtcacctgcttcgcattgtgcttgggaatgggttctgcacccaaacaagaactcatgatcaacctcgcctgtctctcccaccctccacaaacgcagacgactgatcgtcatttcgtgcaagaagccgatatgaacatgagcatgatgcacatgatcaaggccatgtgggacgctccagccgtcagccgtcatcatctcgatgccatctatgccgacaacgaggcggaagaatcgtactcggtggacgatttcgtcggtctcgcaatgtcgacaaaccaaacggaacctccggtcttgcctcccctgaccccggccgataaatggatgatcgagcttcaaaaacggatcgcggaagatcgagctcgacgagacgaggctagacgacgacccgctcggggtgacaaggatcctcgaccccaggatggtagtgacgacgggctacctgatggcgaggtcccacacagacctgtcggtggcgatcatcgggatggagagaatgggtcgcatgatgaagatcgcggagatcgaaattcgggagatagggacacacatggaggacctcgagatgcgcctcgacctccgatcgatccgaggttgtgcaagagaagcccgaatacacaagcggctgcggcgacattgacaatgagtacgtcgatcaggtgaacgaaggaatcgatcccgcattaggctgatcaagatcatttctcagcaatgactctttgcatggggatgttgtcggctttgacaaccgggttctggggagccgtgtcagaccggctgggccggacaaaagttatgagtatcgccgtccttggtcttgttacaaggtgggattgacttccatcctctcgacccagaccgatcgattactgatggcgattactacgctgtagcgacgtcgttctcatcatcacggctacctatccgcacaaagttcccggcggataccgtttcatcctggtcggacccgtcatcgatggactgctcggcggtttctctaccatgatggcgaccaacaatgcttacctgtccgacgtgactcctgatggcagccgtgctaaatcgttcggacgagtccagggaatcatgatgtttgggttctcattgggcccgattcttggaagcgctcttatccgtgcgacgggcgacatgtgagtcgggctaagcacccggagttacgactaatgcgagaatgctgaacggtcccgcttcgcaatcattagcatgagcgtcttttacctcgcggtcatcttcaacacgtgtctcgtgttgttcatcgcctttgtgcttcccgagtcgctcagtcaggaggctcgacacgcgctcggacgactcgtctctgccaagaagactgcatcggccgagcgggatgcagccgagagggcatgggaagaagagtctgacgcagaaaccgatgagccagatgtcaacgcctctggctggtctcggatctcgggcgtcactgccaaaagctcgcgcagtaagagacgcttccacggacgcatgaacaggcttcgaaggaagatgtttgcgttcctttcgcccctgcgtcttttcctccccaagaccaaggtggtcgaggaaggcggtcgcgtctttgtcaaaaaggattacaacctgctactactcgtcacagcaatcttttttatcacttctgtcatggtgagctcggcgccgtaagtttgggggaaacgaagactgacgcagtcgtgcattggaacaggctctcatgcaagtcaaggcgcaattcttgatctttcgttatggttggagttcggccgaggtgggtcttgcgagagatcgctcctgggcatacagtcgctaacgccaacattgatttacagctcggaccatacctaaccttgatggcaggcactcggggttttgtgttactcgtattcatgccgtgtgagtggtgggacagacaagggtcccgaggggaaccctcagctaacgactgtgcttcgaagtagtggtcgtccgtcttttcaaacctataattaagccggatccctctcggccagacctggacgtcgccgccatgcaagccatcgccgacacgcgcttcgacctgtcgatcgttcgctacagtctattcgtcgacatcatctcctatagcgccatggcggtcctcgtccctgcaccggtcttcgtgctcttgacttgcttggtcacctttggatcatgcaccagccccgccagcaactcgttggcgctcaacctggtggactcggcgcggggaacactgtttgccggactagccgtggtgcaagcgatgagcacgacttttttcggtccgctggtcttctccctcatattcgccaacacggtcggcaagtacgctccaaccgtctttgcggtagcggccggtatcattttcgtggcacaaatcatcctcgcgttcgtcgatcttcccagagtgcccgagtggtttgatgatgagcggggacgtgctaggggcgtcaaaagggtcgagagtagcagtaccgccggatcgagtcatcgaggatcgatgtagagccgcggtgcggagcagcactgtatcggtcgggaaagttgtaatttttcttcgctacttgagtattgtatttcgttcgactgtttgcagccgattttccgatagaaaagtcgctatgtcgcgcaaacccgtggtgactgcggaagtctaggagctgagggccatcgacttgtaatgctcctctagctcgaacgacgccgtcggcgcaaggttcgtccgtgcgtcgtcttgagacgcgccagctccttcctctgtggccgcgatcaccaacaccttgtcctggagcgactcttaatgggatcgctggtagactcgctctgatcatcgaatctggcggtattgatgacctagtggcgcatgagagacgccactttgcggccatgccggctaaagcgcaaggtaatacatgcactcttgtaggcaaaaacgatatgactctcgatagtcgcctctaacgaataatatgtccagcgatggatttatatgcagcgagtaccttgtatgcaacttcccacccaggtaaaatggctcaaagaaggccatcgagcagaacaagaaaaagaatctttttgtcgaaggcaaaaaggtgatttcttcctcggcagggctcgaacctgcgacccccgagtttcgatagctgatgctataacagctcggtgcaactaccactgtgctacgaagaactggatgttgagagaaaatttttaacttatatatcacgtttacagaggttcttgcgcgtagattcgaccgctcctagtgatattcgccctctttctcactcgaccttcttgctatatattgtctcaactgaagacggctgcagatcaagtttgactacagccgatgccccagaggaaggaaacgtttgtctggatcttcctctcgacttggcaagctctctctttaatgtgtgcatccaggggggcgagtcgtcgagttgtacaaaacctcggctgcaaagaagtgcaaggcggacctagatccaatcccatgaatcaaaaagactcctgaaaagaaagcaagtcccttgactattcctgcacctgttgtacaaaagcggcgcaagatgtctgattgcatcgaccaatcaatcaaagcggatgccatgacgtcgcaggaggcgcagtaccctgggttgagtttgtcggctctgtcttgctcaacctcaatcatggtgattagttgttcagctctaggcggctcgtcatgatcagatttgagtggaggacggtagatggtgggtgtttgggtcttggaggaggcagcttttggtgtcttgttgatccagtcgcatgccgagggattcgacgagaagcgcgaactctccctcaaaatcctcagaccgacctttatcgtgtccactctagcacttgccacctcactgatcagaagtcgcatcactcctcacgagagcgcttgcgaccgaacgtaaattcaccaaaaaaaaccataatagcatattctagtgcaacggtaaacccctgaattacaatggtcgaaacgcggtctcgagtttttacgttctggttacaacagatctatgtgtgtgtccttgtcatggttcattgaagaacctttttttggtagttgggtaggtctagtgatgtcgtatcagcggacgacctcgatcatcctcctttccccttgcgggcgatcttgcgccttcttctcctttgtcgcaaacatccctccttgagcttgctcgaatccgtattgatggaggtcctcgaaagaacctcccgatccgaaatcgtccagcacgtcctcggtcggggtgatcaaccagggagaaggagattgtcgttcgatatcgtcccgctcgtcatcgtccgaatccaggtcggtctcgaaatcgggaacgtcctcggtggcggaatcgacctcgccatcggattcatccgtgtagatttcggtgagaggcgccaagctcatggcctggtctaccaggcgagcatcaatggtatcgagctcaagctcgtcatcgtcgtccaagatgtcataacggatcaaaacctgctcgacgctcagcccacactcgagagccggcgcgagggttcccttttccatgggtccgtccaatttgtcttgaatcctagtcggcaacaatttgggcgacggaggcggtgcaaggtcgatctccatgagcaagggtggaggcgaaggggtggtgctcctgctcgatcccctcgagctagcgggcgagggggagaacatggaatcgtcgtcctcgatcgggtagacctcggcgtcctggtcggtaatggtgatagccatcgggttggattcgggcgaagtcacagcttggagttcgctccaagtctgttcgaaccaggcctcctcgccctcctcgacgaggtgggtcatcgaagactgagtagggtccatgacctcggcagtgtcccgaacaggtttgatgtgggtaggcttgcagatgatctcgatcgcgtcctcctcgtcctcctcgtcctcgtcaccttgctcaaagagggcgtccatcccgctctcgaacgcctctcccctccatcctgcggacattccgctgttcttcctccttgtcatcccaaatatgctttcctcggtcctctgcttcctctccttctccctagcctcgataccccattcgagcgcgttctggagcaagacgccccgacgtaggagatccgactcgtccttgttgccggaaaggaggtgggcaagcgagtcgagtttggtgtacgagatggcgataagggtgtcgagcgagggacccgaggcgcggctgcgggtggtgaacaacatgttgtacgtttgtcgtcgtcgttgttgcttgtggtagtactgattaatacttgttacccgaagaggtgatgtatccgttctttgaagtggtgaagtatgtgtgtgtatatatatatggctgcgaaagagcaagatgcgagtctaatcagccgagtgtaccgagacgcatgatgtcgatcgctactgacctcgtatgcttagagttcaacgtcaatctccgaaaggtgcgtggtaggccaattcgatttcctttccgtggtctacccccctgtggtcgtgcgtcttgagttggtcttgagttcgagcgataggcaacgaagtgctggtcgtggtgatagcggtgaggctcgatgtgtgcttgttcgtatgatcaagatgtaatggttgtgtctttcgagtaggtatcataatagtcgagagaaaggggaatgatggctgtgttgcgtggttggatgattggatgagaaggttgggtgtaaagtttggcaagttccggttgaaatgtaaacgtggtgggtcctttaaaggtggcgatgatgcgtttgcgtttgcaagtgatttagcaagacattgcagagtgcgctgagtgtgaataggtgattaaatcgaaaaggagattttgttttctttttgttttcctttgagagatcgatatggatgacggggagatcgaaagtcggcacagatataagtagtcgtggtcgggttcgggtcgagtgagagtcgagagggaaatgtcgtgatcgcccgatgactcgactcgactcgactcgactcgactcgcgatccttccgtaacggctgcttatcctggtcgtttttacttccggagaacagtcagccagccggggtggtcggccgcgtacaggtcacggcgaacggggcttcacggcacggcacacggcgagcggatcaaccggaagcagatgaggtgatggtcccaagtccgttccgcccttggctgttcccccctccccgcccgttgctgatcaacaaaattcgggctcggatcgataatcaagacaattggaaagcaatcaccgtagatatcatcgcatcatcgcatcatcgccatcatcgtcgtcgtcgttgacgtcggtcaccgtggtcgtcattatcatcgatcgcgtcagcaaaagcaggacgaagacgaacacgacacctgggtcacctgatcgtgaccgtgactgccaaccccatttgggtattactcacgcaaatcccccacccacagaaagaccccccgctcccgcttaacaggctcggggtgagagggctcgtcagatgggggaaagagaattgggccgacgtcgggtggttcttggggaaaaaggggtgggatatcgggtggagcttggtcaagtacgggatttggggacctccgagacctagttggggtatcgagtgagctttttatacctccatttcactcgaaggcgctgtcatcgatactgatcaccctctctcgtcttgatccccgtcccgttgtccccgtttctctccctttcgcaaacgacgtagaatgacgacgatcgccgcagtcatgcgtaacctcggtcaacattcctcgttggcggacattacgctcatcaggaatttcatctcggtgcaccatctcctacccttgccacccgatgccatcgtcacccccgtcaggttcgaagtcaagaagcgtgaggacgaggaagggttgaaggggttccttgcgtgagtctttttggagcggtaccgtcgtatcgacggggatcgagccagtcgggctgagtctttctttctttttcttttcggaaccgccattacatccgcagtcgactggacgcagaagagaacgggatgagaaccctctcgggtgaatgggtggtcaacaagtcggtatggaaacgcctgaggacagaggcacgggagagggagatggagaggaaacaacgtaaacgggaaaggtcggccgggagcggacgaagtgtgccgctcgatcctgctgtgcccgaatccgcatctaccgagatgaacaaggagacggagatggaagaaggagcggacaagatcaaggcgaccaggaggaaaagggaggaaaaggtgatctattacattcatggaggtcagtccgcgatagactatcgagtccagccggttctcgtgtcatattcggatctgatggctcatccaccgtcgggaccgctcttgggtacatacaggagcatactatgtcggacaagcgacgacccatcggaccatcacgatcgccctctcgaagcactgcaactgtcgagtctttggtaggtggtttcggtctgcacaatggtggtcatcctctggactgacgcggaggggctcgattatgacagccatcaactacaggttggctcccgaggtcagattccccgagcctctgttggatgtggtgtatgggtacttgcggttggtcgaagatttgcgtatcgagccgaggaatatcgtaagtcgatcgtgaccacgggtcttattccgcctctatcgtgcacataccaagttgaatcccgtctgctctttgcagatcgtcatgggagactcggctggaggggggctctccctcgcattgatcatgtacctcagggacgccggataccagaacctcttgcctcgagccatggtcttgatgagtccctgggtagacttgacgatgagctgcggaagctgggacgagaatgccgagttcgacgtcgtacccattcctggacaagaaggtgagtcggagggcacatctatgatcgaagttctgtgctgatggagaacgcgtgttcgcgctcgtattcgaaaagatcacttgaacccagtctcttgttatctcggacccgaaggaatcaagaaatacctcacccatccttacgcgtcgccgttgtttggggactttgcgggcttgcctccaatgctggtgcaagcgtgagtacggaatcggaatgcgcttttacgccgcagcttttgttgagtaacgggcgaacggcttctcaatccatagcggagacgccgaatgccttcgagacgagatcacgctgctcgcccacaaggctactctggccggagttcaggtccagcacgagcttcacgtcgatcaggtgcacgtctttcagtcgttcccctttcttgagagctctggagtcgcctttaggtcaatcgccaagtttgtccagaacttgcaaagtacgacttcagactcgttccctgggcacaagggtccgatcccgcagattcacgtcaccgaacaagacaagtcggtccggtccgaagaatcgagatcgacctccccggtcgatgaagacgcggtggcgtccgaaatggcacacggtgagaccaagctcgtcaaatcagacggaaccgaggtcgatatcgcccggaccaaggacgacgatgaagtcgaggacggaaacgacaaggccgagcaagtcttacaagacaccctggagaaggaagaagaggaagaggaacagaaagacagtttgagtccgctcgtcaagagcacgcttacgctgccgaccatgctggacgaccaggaggagggagagaagcagcaacgtcaagaatacacgaattccaactttgtggaatcatcagacgacaccccggctgcgctcgaattcgcaccaaccacgccgcagaaaccatttatgagacgtgcactgtcgggcttcgttcgaactcgtccggaaagcccgcaattggtcaggaggatatcgggatcgtccttcttctctttttcagccgtcaggccgacgaccccaattgttagcaaacaggatcaacaacagcaacatccaccgccatcgccctcggcggagcatgtgaccctgccctcctcgccttcctttcctcattcttcggttcgaggacaccgaccgaccatctcgcatcatctgacgcgatcgcctgtcattcctacgacccgcgctcgctctcagagccactctgacatgatcagtctcgtcaatggctacagtcaacgaggagcggccaacagcacagtcgtctactcgcccggacccgtcaaggctaccgcgctggctccggatgatgccgagcttcaccatgcgcctctcgacctcgatacgcagacgaacaacgggaacatgcccggtggactcggtttgctcacgcatggataacgaccccttacgaatttctgagatacatgttgttttctgagcatcctatgtaacacgttgtccgtatctgtttctcgtccacactgtcaaaccgtattttgatcgtatacggggctcggcagcttttccaatagcataatggtttctgtatgacgggacgggttgattgactcgcgaagtacacttgttgggacaaattcctggcctgacacgccttcaacatcatttctagtacttgtcattgacgtcttcccgatggatatcttcgtccctcttcttgtcgtagaaatcggctggcacctgtcgttcctggcccatctccatatccgtcttggaatggtatccaactgaatggcgaaaacaaagaatgtcaatggggaacagcattggtcaatcttctgaacggctgctcacagaggcgatcgagcgcaagcagatccaaacccttggtttcgggcaggaagaagtatgcccataccgcagtcgatgtgagactggcaaacgatcggagaactcagttgactttgtaaataaagccatcggaatgacactcacactccggtgaagaaaaaccaaactccgaatcccattgcgacaaacatcttgttcaatgattgtgtgatggcgaactgagtgatccactggcacatggcagcaaaggttccggtgacagaccgcaaacctccaggcataatctcggccgatacaatccacggaataccgttcagaccgaaactccaactgcaaactgattggtcagttccgttccggcagagatttcgcaaggaccgccgcttctcacaagactgagtagatcatcaacattgccgtcgcggctttgccacccgcaagattagacgctgacaaaggctgtcccgcagcgatttttgtagctggatcaccgatcttgacgtatgctccaacgaatgcaaggcagcacgcacaaccgatcgatgagacgatcgtgggttgtctccgcccaaccatatcgatgaaaaagatgtaaaaacctgaatgcgagaaataggagagcgaaatcagctatctagaacactgttttctagcccttcaaacgcacaaattgagccgatgcacttgacaagcccatagatgcccgtatagaggttgacatcggtgattccgatgctcctgaataatgtgggactgtaatagttgatcgcagcggccccgctgaagttttgcagcaaaaacagcatgaagatcaagccgacgcgattcctcattcccggcagagcaagttgcttgaaagcgcccttgacgtagttccacatgccgggtctgttacccgttacagacttctcttctaggattcggttattaatcccttcgatctcctcttgaaggtctaaaattcgtcggagtcaatcgcagcaccaacgccatcctagcctcacgactactcttacattggtgatcaacagggatacctcgcaaatattcaagtgtcttataggcttgctccgtcttgccggctcgaataagttgaagaggagacttggagcgaggaacgcgtaagaggtgttcaatctgtgttgtatctggtgcatttatatatcgattgtacccacttcgtgaacccagatcaagccaatcaacaacatgcccgctggtatgatctatcgaactgccttaatgtatgcatcttcaaggtatattattttccactcacctgcaccgccatggggatcctccaagcattaacggaattgggaccgatggtcttgctgttcgagatgccaaaattgatccagaagccgacgagcgaacccagctggtagctgatttcgaagaagccggtcaatataccgcggatggacgggacagatagttcggcgatatacgccggcacggtcgcggtgataccaccgcatgctggaagtcaaagtgatcagacgggtgcttggcaatactaaccttgacgaaaaggctcggccttaccgaatccagtcaaggcccttccagcatagatcgcgccgaggttggtgatgaaggacatgatgatcgcaccgatcaagaagatgacgttattgacctggagagcccactttcgaccgatcttttccgttagaaaccaacagaagagagctccgaaaaaagcggctgcctggaaagtgcttgtaatattcgagctcgtcatcctggcttcttcggcgctcatcgcggttatgccgaaggcatccttgaaacctttcctcgcgattgtggttccaaaaaaggcagagtctgaccgcggaggtattcaggtgcaaatccctcggattctgggaaggggatctcttaccataaccaaacaggagtgctccaaaagctacatgacaaacgtttgcagttgataagtatggcctcgaaagataacacttcttgttactcacaaatcactagcgcatcatagtacagccgccgattgtatacctccctaggggtaggtctgccgaaaatctgtcagcaattgtgatcataggccgggtcacgcagtcatagcacacctgtcctctactgctttaaaaccacccatgatagacgacggtggtaatccttgagatttcttgcgtatgagagagaatatggcaactttcgcatcatgcgtagtgtgtggggtcaagagaaccgactgatatatagacgatcgggaggcgtacgttcgggccgatgccgatgtcgggcttcgtcgttcatggtatcggaagcagagtttcgggacagccgatatccgttagcgcgcgcgaaattggatcatataagtgcgtccaacgtcgacaccgtttttcgacgaaagacgtttgcgttgatgctcgcccatcgcatctctgtccaggtaaatatccagaatgtctcctgtatctacctcttcccacaccccccgtggcgctgctttgccggatggcatctacgttccgacggtcaccttcttcagcgatgacaaagagcaatcgctcgacctgaacacgtatgctgcccacatcaagtttatggcagatgcaggtgtgaccggaattaccgtacagggtagtaccggcgaagccgtagctttgtctagggatgagcgcaatcaggtaagtctcgatcgcacggccgtgtcgccgtgccggctgacctcgggaccgtttccgagcctagatcaccaagaccacgcgggacgttttgaatgcagtgcggcctcaggcgtataccccgatcatcgtggggaccgtcggtgctcagacgacgcagcaagccattcattactgccaggatgcggcagccaacggaggggacttcgcactggttcttcctccagcttactacgcctcggcgctcgcgaagcaggacatcgaacggttctacgtcgatgtcgccgacgcttcgcctctgcccgtcttgatctatagctatcctgccgtttccggggggatcgatatggacactgacctcttatctaccctggctaagcacgacaatatcgtgggaatcaagcataccgaccactcgttgtccaaacagacccgtttggcatctctgcgacacacgttcgggaccttttccgtactaggcggcgcgagcgattatctcttggcttcgctcagcgtcggagctcaaggatgcatcactgggatgggaaacgttgctccaagaacggtcatgagagcgtacaatgccttccgtgcgggagaacttgacgaggccaggaatctcgctggggaaatcgcccatggcgagtgggcgcttgggaaaggctctattaacggtgtcaaggtgagcaagcgctcttccgtcagtattattatggcaaccgctgagtgaccggcggtttcttcagtatgctgtcagctaccacaatggattaccaatccactgctcttatcctcgaaagcccctcgccccggcctcagatgtagtcatgggttggcaagagaaagaactggtttcgctcgtagctatcgaaaggcagttggagaaagaggcgggtcaggagggtcaatacggaacgtcgattccggatgatatcatgccgagcaggctgaagatcagaacggctgccttggcagattagtgttttgcttgtaaaatgggaacagatgtccgtgtcgaatatcgtaacatgcccagatgagctttgggaaacgagctcttattcttaaattagttgtcaggctacggactcggccggcgcgatcgggagctcgatctcgcttcatggtccaactatatgacttccagcttccaataaagagccattctgaattacgctgcggtaggaatggtcaacatcatgcttgctgtggcacgatatgggcgacagtagtacacgtatcggtagcctggtcagcgagccagcgtcaggaccgaatcgtcgcatccccaagagggctctgcaggtaagcgggcatacggtacagctctgcgttcagaggatattgacgaaatccgcaggcatgtagtcactgccgaagccaaaagttaaaatgcttgggaggagacccgtgtcgacggtgtctgcgtgcaaatatcaattgcgatttgtgagcctgccggtcaagccctgtgtcgtccggccatgtgctcacacgacaggcttttagcacgtcgaacgtggtgtccgagcgaggtaaacgaccgactacggaagagaggatcgctcgccttgagacatccatgtcaagcgtgattgagcaagtctccttcatcaaggatcggctcaccctacgggtcgaccacgaagacgatctggcagcacccatagtaaccgaacaccaggttactggcacaaactcagaacgaaggctacaatgtggattgaacgacacaagcatgcgcgatcatctgccgtatgagcctctcaatgaatcgattgccgacaggctcgaagatgtcgaagatgatttccctgaaggttccacgattcctgggcaaaccttgggagatcccgctctcgccccgcggtcctctttcgatcctccgccgccaggatcgtctgctgagaccaggctcaggactgctatgctttcacgtttcgacgcacctttcaaggcgatctcgattaaccctcgcgtctgggataatcgcgaattgagcagacgagccagtcccgagagggcgtttattgacagcagggttgggcttgacatgatcatcaacccggcttcagggaggaattttaatgtgagtgtcaatccggacgaggcgtccagtcggagactatgggatccgatcgaagaaggtatcattggtcgcgactccgccctagagctcttcaaagagtgagtgcgccgcctggtcaagtgagtacattgggttgacacgacacaacatggcttgctttagatacgctcggaatctccatgcctttctaccttgtgctgacgtgagcgaggatgaagccgggttcgaaaaaatgcgaagttcctcctcgtatctcttgaccgctgtgctagccgtttccgcccggttcgccaagacgtcctcccttgagggatcaatgttatctgtcgcggcgcaagaagaacaagcgatggtgatcgaccatgttacctaccgggcattagtggattcgtgcggtacacagctcgggcaaacgatgcttaggaagcaacacacacttttcgatgtgcaggccactttgatcatggctggttggggtctacacggcgatggaggtggtccggacgcctgggtgagtacttgcacgtcctgtcgacttagcgaagagttggtgtgctgaagcctgttgagccgcgctatagatcttgactgggcacgcattccgtatgagtcgtcgcttgggcatgcacaacgatgatgcgcttaggagccaagaacggcggacttggtcgggacagtctgcacagaccaggtcgtctcggtacacagcgagaagaaggacgtggctttgcctttctttcctggattcgtgttttaccttgggcttcgggcgtccaccgagtcaaccaaagctcgacagcgccgacacgactgtatttctggaagaagttctcgacgactctgcgtacaataacagtaacaattccgatttcgaggcgagtcgacttctcgctaccaaagctggagacctgtatgtatgctgtcagattgagctcatcaaggttcgttaaaagagccaaagcttggatatgatacgaatgttgacggacttacactgcagatcgcacgacatctcaggcgagacatggacgccatccgagagatcgccgagggttctcgtcacaggagtgatttccctggtggagagagatccgctgccgacgcgatcaccagaatgtgttaccggctaaatcatgatctcgacatctggaccgagagatggatgtcgacagtatgttcattgtgaagtcgtgaagtgaaacatgattgacctgaatcgcactccagaacagccctttcgcttcactcatgcgtgttactgagcgtatcattgcattaagcgcagaacatgtccgactctgcatcaacgcatgcgctttgcgaccggactcgagcaggccttcctctgcgggcttggatcagcgagctcgcagcaacagggataaaggagatgaaggtttcgaggaagagagactgcgagacaaggctatcaacgcagcctgccaaatcgttcttcttcatgcggatctttcgacggcgggagggaatttgagctatgccaccgatgtaagtccagttatttgatacagcccctagcagtttctgagtcttcagcagtacttttcctgtaccttggcgcacgcggccctgtttcttgtctgtgctaggactcaaggtgcccgaactcggcgatcattagtgctggagcatctacaactagcgatcagtcagtcgaaatgctgtgtgggcattagtaaagcgtacaatctgatgatcatatgatctgattttactctccgacaggcgctgctgaacaactcgaaagaagtcgaaccaagattttgacgaacctagcgaggattatgaggtcagcctatcgcccacggaatcagaggtggacgcaaggtactgatttccggttgctactgaggcagagacatagctcaggcggcggggtttacggaagtgatctcccatcacgatctcacaccgacgatgcactacgatccgtaagtgtaccatccaatatcgagcgactgaaagaagctaagctgaaaggcccggcaacggcgagtagtctatcgatgttcacgcacgccgagggctctaggttcaacgtcgatctcgctattccctcaggattagatctcgatttcacgcagcagtatctgaccacgctttttggcgaactgaacgaacaagacatggcatttcccgccggcgaattgtggccggcctaaggcagtcgaaggtaatcgattgatgacggtcggcccagattcgatcaggacaaagagttacatacacacaagcggatatagtggtcgttacgatataatgcgctctttccctattctgtctcatgcctgttgatcgagcggcctatctggcatgagcaagaaactcgatctcctactgttattctccccgaccagtcctggacggacggtcccttccgagctagaaacggctaacgagcctgtacttgactgccggctcatgccgtcgtgcgagcccacacgcgaatcccctttgcccctttctgtcaacatttcctccgtactctcgccccgatccatgtcccctagtcggggaggctgtccatccgttggtgatgagcctccgcccatcatcggaaccggtttcctcttcgtgttgctgcccattccggtgctatgcctcttggtgctcatgctgcgaccaatcccggcccccttgcccagcgttgtagaagccacgctggcgttcctctgtagcccggtggcagaggtatgacgctgggaagacggggtcgatagcgtgacatcatccggttgataagatcgatcgtcccgttcaggatcgaacggggatgaatgtgcgttccagctctttgccggtgaagtcgctgtaggcgatgtcgagccagaggcagaacgggagtaatcgtatgcaacaggcggcattccggacctgccgaggccctgatgaccttcctgatctttgttgagaacgggaatgttgagtccgacgccatggcccagcggagccccgagaggctgcaatctcgtcaactcgatgctccgcccttggtcccgctgagaaccgtacacgcccatatcgtgcttctcctcgtccgagtttttacgttcaattccgaagcctgccgggtagttgcccatgctgggttgggtctgatgcccctcttcgatagggcttctccaagtggaactcgtcgtgcttcccggggtggtgatgggaccggatatatcttgatcgttgaaccctcgggcgatactccgttgactgtcacgtttgctgcctccccgtcgaccggtcaggcctgccggtacgaaacctctccatcctccatccccaccgtcgaacatcctccgactggattgactcaaccacaacgatttacgctgtctttttctccagaaccagaatgcgataaaggcgatgatcaaggtacccacgatggcacctattacgaccccagcgatggttcccccgtccaccccgctcgacgtcgaggacgcttcggagccccctgcgacaccggtaggatccggccgagtctcgctcgagctcaggcaagccggattagccccattcaggacggtgaaaggcgccgaagagcccaggatcttgttcgcgtttccatgttcggtggcataaatgatgtagcggccgaggggaaggacgacttgagggtaggtataggcgttggaagaagcggtgacgagggtgatgttgcggttgatcacgtcggacccagagggaatggcccgggaagagatggtcgggctgtggcgttctctctgaacgaggggcaagagggcggcgctccctcccttgatgctgcccagacctcgagcggcgtgagagacggtcgaacgggcgaccgtcgaagtcgctgccgccggtgtcgatagtgaggtcgtgctgacccgcaccgaggcagacgacgtcacgatcggcctggacgtcgccgacgcagacgaagacgaagaactgaccacggatcggcccgcactgaccgacgaggccgatccggatgataccagtgaggagcttgagctagaagatccaccaccttgagctgggatggcctggtcaatgttctcgttcgtgacaaagagatcgatcagggcggaccgggaccccggtgcgaggtctgccgggagcgtccacgtgaacctaggtaaaacagacgggagtcgagggggataagtctatgccgcgctggatatgacgacaaagtggaacggctcgacgacttactggtatgaagcacatgcgtagagagctccggggaccgtatcgaaaaagaccgcaacgttggtattggtcgcagaagcactggcaggcctcgaggtcgagctcgatgccgtcgtcacgaccgcagaggttgcccgactgacagtaggtgttatcgttgtcgttgatgagagtgaggtggtcgactgcgaggtgacgaggtggaagaacgtcgaggtgaagaagaagcatgatgagaaccgcatgacgatgatcgaccctcgagagcttatgttgtcagtagacgttgactaggttgatcctcgaccagcgagtagatcgttcgaggttgtagaagatggcgagtcgatatcgtccgacgtcctttcgccgttcgtcgggttggtgatgtgaccccgaacaagactgagttgtgaattgatcgaatcgaaaggaccttgtctggcacagcctaaagatcccgacggaggtgactatcgatcagccgttcgacggacgtggggttgtacgtcccgatattctggaacggaatgtcgggtccagaatctggtcgatgcgggacgaggacgtcgttgggcgtcgagtcggtcgaggtacaagacgatgatgagatggtgtgatgaggagacagggaggtcgagtgtgtgcttcccgtctgaaacctgcggctcgggaagaagcgagcgagcgatttccccgcaaacgccggggcaaaactgagaaaacggggggaaatggggggttgatgccaccgaccaccgaccaccgaccaccgaccaccgacccaaactcttaccctacatacaggttcaactcgttgctcagacgtcgacaagcacatcggcaagtcactcggtatggtatgggattgcatatcgtcagacccgaccagcttcgaatcatgctgactgttcaccctgctctcgctcgtgtgtctgtctctcccctgatccccctgatcctggcttgacctgaattgccagcgctccttttgagacgctagatttgacagaaacagctcgtctctcgagctcgacctctttcctagacagaccgagatccatctccacgctgcacaccgatctatgctaataatatcgctcaatatgagacaacgcttgtcctccgatacaacatacttccccacgccatctcccctcatctcaattctatctacctaccccgatcgtgatcgcgggtcgctcttgcccgcgcgtcgatccccgccgtcgagcatgagctgcatgtagaccaaatcctgccaactcccaaacttgtacccgacctctctcatcctagcgacctcgacaaagccaaacttttcgtgaagtttcaggctagccaccgtctcgctcccgatccctgcgatcatcgtgtgcatcccatgccgctccgcccagtcgatcaacgcgcgtagcatgaccttgcccagccctcgaccggtatactcgggggaacaatagatggaattctctaccgtcctcgagtacccagatttagtgttgaacggtcccaaactcccaacgcacatgatgcgtccattctgacgaccgggttctagatcccggaggacgaagaccgggtagcccttcccgacgaggtcgaggaaccacgctcgacgcgcacagagctcgatcggctcggattcccaattggcggtatgatgctcgatcgagtggttgtaaatctcgttgatctgcgggacgtcgtcgacggtggcatcttccacctgacagacgggtaaatcgctgaagagaggtaagatgagtgagcgagagcgtatgtcgcccaggaagaattgcgtgcacgttaatttccggggcgggaagggggtccggtacgggagcgggaggcgggagggcgagagaggggcagagtcagcatgtttcgcgggtgatgaccgggcggcatagatgaaatcgagacagggacagagggacatcagccactcacagtctggtcatcccgggtcgctcgttccctcctcctctttgtagctcgggtacgggtttctagtcaggttccaggtccaactcgaataatcataggccataggcgatcaggttcgacgcatcttgaaaatgtcaaggtcggccaagtccgttcgggataactcttgacctgggactcgacgatggacgcgtcacatctctcggacgttaccgacagtcgacaacctttgacatgtgatggaccatgtcgataatcgaagcccgatgaagcggatgatatacagagtacagcctgattagatatacggggcgttgtcgataaccgaccgacacggcctaaaggttctccagtaccgccttgacccacgcgttgccgtcaaacttgtccttgtattcggccacgacctctttcaacttctccatctggtgatccttggacatcgtgtcgacgtcttctccaccccttccagcccgatccgcgtcgacccgcgtcttccaggttcgaaggaactcttccacgattaatgtaccttcgtccgtctcctcctttgagatcttggaaaagatgtctccactctctacacaaggcgtctcggtctatcgttagcgacagtctttgcaactcaacctctcgaacaggctcgtcttacctccaaagtcttccagctcgtctgctttgcgcttggcgagctatcccatacgaatcgtctcgcaatcaacgcgcaactcggtcgctcgtaccggacatcggactgaccttgatgacgttttccgggaaattggccatctcagctacctgaataccgaaactctgatcacagacccctaggacaacatcgtcatggtcaggcgatgaatggaccagaaacaagatgccagtacataccttcctcaaccttgtacaaaaaggtcacatcgcgatcttgcgcattgttgcctcgctgggtgacgtgggtaaggacttgataattgcgcacatgaggtagattctccgaaagcgttgtcaattcgtggaaatgcgtggcgaacagacaaaagcagcgaatttcggtggcaatgtgctcgctgatcgcccaggccaatccgaatccgtcgtacgtggaagtccctgcagaacgacgagcagtgtcagcaaacgataacatctacctgttgatgagaaatagcccgactgacctcgtcctaattcgtcgatgatgacaagcgagtccttggttgcggtctaagaagccttccggatcagcttccggaaaacaaggggatggattgggcactccagactaaccttgaggatagccgcagtctccaacatctccgccataaatgtcgacacgcctttcaattgactatctccagcgcccacccttgcaaggatcgaatcaaatatcggaagagtagcgctatccgctgggacgaagcatcctacttgagccatgagcgcgatcacaccgatctgcgatgccagttctttgagcttgtgttggcagtgggaattgcactgtttgcattcacctgtctgatgtaggtcgatttcccgcccatgttcgcacccgatattatctggaattctcctgcacctgcaagtttcgatattctgagctttgtcaacaagagtcacgtatgggctctacactgacctttcagcattttgtgatcgttcggaatgaaattgatctcatcctgcacctcgagacaagggtgcctagcttgctcgaccacaagatcgccatctccccctgttttgccaagagaaggagctcagagacatggatcgtaaggaacataatcgcacgaagactacctttttcggtaacggtcggtttgacatatgcaattggtgcgttctcggaaacgtgcgcaaagctaacaggttctttcaatcagctgggagaacgtggctaatcggggtctagacgaacctgacgatgacatcaagggaagcgaccaatgcgtctagaacctcgaggatcggtgtatacgaagctgtttgagggcaaagtcggcattggttcggcgtgatcgtaacaagggagccagacttaccagcgattgccaccacctccttgactagacttcgttgttgtttctcgtactgcgcagtaagatctccgtgttcctcgctcaggttcttcagcgtgcgtgtggtaaagatggtccctgatttctgcacagctaattcgataaactttgatttacccttgagctttccggcttcctgtgattgttcgagctatcagtctttcggctcgagagccaagcgtgactgaggaaacatacggctttcgtcactcgtaacgaatatccgtacacttggtgtttttctagatgtagctttttctccatatccagcgagagttcgtccgctactttgctgtgttctgcatcgagcgaatccatgaccccgatcaatttgtcacggatttgctcgaggtttgggtcaaaactggcgacaagcacgtaattgtgattggcgagctcgtcgagatcgatagtctcctccaccatcgatgcgtaacgctctagtgcctcgttgtgttgctgaggcgcatctcaaggtaagccagcttgaaaggttacccgcaagatgtagcgacctactttcaatggctggatgtaaaggcgttcaacgagatcgatgtgctgggtgtgaatgggctgaacttcctggagtaacgagatcatttgaggaagctgcggagagactgggatataagcccttcgatgtcccaaatcacgctccgcatccagcaagcgcaccttggatacggcttgatatactcgaaccacatcctccaatgaagcgttgccacgattaaagcgttttgtgattctagtaaagtctggcatgggccgcaagcaatccgactaacagccaataattctagtcaagttcgattcaggccaggcgagcgttcatccctcaactcacgtgcagtgatttgcgcgtgctggcatcctcaacgaatgcctcgacgagattttgtcgctgctctgcaaatcaaacaagcctattactgtcaatagtcgaattggcatgggccgagatcgacactcacggatctcatgcaggttcaccaagggctgcttcaaccacatttcgagcagcctctgtccctgagccgtcttgcagtgattcaaaagaccgtacaggctcatgtttttattccctcccaactccatcgggttcggcattaggttcaacgccttcaaggcggacgcatcgagtttcatatactgcgaaagatcgtgatgtcgtaatcgccattgaccgtggtgcgccgtcgcattcgctaggtcgaggtacgagatgacgcatgcgaggcaggagcttgctactttcaggtcgaactcggctatcatggcaagagcattgagtattcttgttctagactcaaatgccaagatccgtagactcacgcatggcgactgttgacaccgacgggtggagaagccgtttagtatcggactcgaccgcagtggcattaaacatccctttattcccgagtcattcgacggtcacgtcagaaaggggcatgcgagcgatgatagcggttgacttcgacataccggtctgaacttcggtgatgaccaccccgcaccgctcgatcatggccatcaacttgataaagtcctgatcatccttgcccttgccctttgccgacttcgttggcgggtctacgtccataccatcatcggcctcaccgtcaacatcgatggcgatagattttcgcttcttgttcgatccgcgagccgttttggtatcattcgtttccacaacgatgcattccttcactcctaactggatgatcaggctctacaaggcagggatggccaagtacgatatcaggtatggtctacggcagacatctcctccaggcttacctcggtgttcgagaacatttcgtcgtctagaaattcggccactcccaacctcctcgcactggcatctgcaaaggccgctccgatgagacgcgtagcaccgccatctttgagaacgagcttgagagccatgacgatcggcgaagagatattgtccgtcgaagagaagagcagatcctcgacctgctggatgttaccgggagatgcctgcagacaacaagagcgaaagtgagctcgacatgacctgatagtcgagcgtgtaaaccgttgatgactgacctctttacctaattcccaacggttcccctgcttcttgccaccttccccttcccaaatctcgaccctcatctgtttgctcgtcaaagcctctctcaagaagcccttagccagcgtggttgatagcgtcaaactcggtagcccctttttctgattagttgatgatgatgctccggagttggaagcagatgtagctgtagcagaaccgagatatcggatgacattggtcgtcttgtagacggtttgagcaatgagcagggcatcgggaccgtgggccgagaagtagtcctgatcgcgagagacggtcgatgctcagcaacacttgttactgcatgctaagcgtgatctatgcttactcctctatcgaagagccggaccgttccagggagtcgctgcaaagtcgaagcagaaagatcagcgaattcagcggacaggctcaacacttgtcgtacggaaaagacgcacactcggcatagagtcaaagaaccgacagaaagacgtctcatttgtcttgtctacagagggtagaaatcaatgggttgaccgcatagcaatgactgttcacgagcgtgactcacctccgagatcgaggactggtttggcggaagactcgctaccatacatctgagggtgatgacgaccccggttatgacctgatcactatcagtccctgccgtacgtcgactgaccattctggcagccatgatgactagatactgggggatctcgtcgaggaggatgcagacctgcttgatatgttttcttacgtctggatggccaccgatcacaaggaactagtcacgaaatgttcttgatggctgcctggctgatccgatccaaaggtcgacactctcacctctctcttgctttccctaaatgaattcgcggtaacgcgcgtcgacgcgttggacgcgtccacgacagtatgacgaccagagggccctcgaggcgtttcatcgtatccaagatcgatcctgtataaacgttcttaatgggaccatcgacgcccggaatatttagaccgattggcgtgagagtacgcggtcatactaatcatattcggcagtggaggatcaatttcgtgggtaagaagacttaagtgagtcttacgtgaacatcacgcacagcctcgaggaatctttgcctgacggtcatggtctcatatggtcttaggatatttgtgccgatcaatcgcaacagcatccctcggatcctcccttctgcaacattgtttctcggttcttttcctgtcggtcttggacatcctgacagaattcaaggccggacagcgtggcattgcagtagatgcggacagagcccagcattgaccagacgaattttcgggttcgccgtgttccctggcgcctctgcaggacaatgtgtccaacataacattgccatatcttgtagatccgtgggatcatagctatagtgcttgtgaaactataggcgaatcatgcatacgagggttttgtgaggggtctccatgcattcttagtgaacgcttcctcgatccatgagccgttgaaccaatcggagggtgctgatcggtagccaaacagacgatcttatagtagggtatgctgttcctgcgaaacaactgatccgtatctataccctaacagctttcgccgagttttcaaaattaaaaaggaagtttgcaaccgatcaggcggaaattgtcacaggattgacatggtctgcatcgacttgcaataatgctgtcccaggccaagcattgcgtactgaacacgagactcctcaagcgcccctattacattatcaggcttagctcgctttacccttgcgatcccggacgtggtggaagctaatcccctcttgagccatccatgcgctgattctgatcaacaaaatgaaacgatcccaaatgcgagctgtatccatacatgcatctgtgctctgtactagtatatcttgctagacacctgccaaatcgttcggcggttacaagcccaagcgcctcatcacagccggccacaggctttacggaacctttctgacatatcgtctagcttctgcatttgtacccgccgggaatcggcgactcacaaacctgtttcgaagaccttggttcgactcaggatggtgctggacgctggaagctgtctggcacggacaacgggacggaagtctgtggggttgcgaaaagatcaaggtcgagggagaggacaaaaagaagctcaaggagagacgactgaccggatacgcggctctttcgctcgtcccggtggatacctcggtcatctcgcgggagagtggctcgggctcgtcctcgatcaatcagtcctcggtcgatccagtagtatctcaagagcagaacccggatcacccgactcatcaatcaaaactctgaaacacattttgatctggtctgggggtcgaagtcgtaatcaatccatcttcctagcgagagaaggaggcccagctctcgcggtcgtcctcgagctcatcagcatatcagcatcagcatcacacgatcacatcagtcctcgccagaacgacgagcacggatcaaggctgaatagggagcattcagatcagatcagtcccacgaaaacttacgaagggctggtcgcagtcactttgcagattgtcttggtacggtgtggagcactcgacaaaggtttctctacatcaggaagagaaacagtatatatcacgaggacgaaggttgagatctatcatcctcccaagaggatgtctgattctcactaattgatcatgaacctcgatttggtgcttgtctgcgagacgtagcatagctcagctaaagcgagtaagttctttatcttccggatgggtcgggccgggtcgatcattttcactgaccggacgatttctcccttctccatcccgatctcgtgcattattgcacggttcggctctgtcttccatcccttaatcgactcggaatgtcctttgaatcgtcgtcgtgtagatcacaagtttgagtgctcgaagacatactcgaccatgagcctgacgacaacaaacgacgaacaggacgaccatcatcaacgtttagaacgaaaacgatccaccgcggctcccatcaacagcgaccagaccgccagtgagagacggcttggcgacaacacaaaggcatctcctccgtctgctcctcaccaccaccatcagcaccatcaacaagcgtacgaaaaccatcgcgactccgactcgaatcgctcgacgataactccaccgtttgccgatttccctaagagcccttcgagcaccacgctcgactcgcacgctagtgaccgtcaagaaaacacccggtacgcctctttccgcgattcgtacgggcctgaaaagggtttcagcatcgagatcgagcaagagcctctctccccgtctttcaccaacgacacgctcgatcgctattatcagcaacgtgtctaccggggtcctttggggaattcgcaatacgggattgccagtcatcacggtggcatctctgacggttacgagtcgaacagaccggtcacggcgactagctcgtccattgagagccccagcacggcgcagacagacggatacccattgacacctcgctcggccgatgataacgaggacaatcattctatcgtttcgtccgactaccaggccagtaatcgtctaacgacactgttgtacgatcttaagatggaagatctggatgctggatatcatcagcagcatcgacagtatcaacaggaacgcagccatcaacagactcaacggggtgcagtagcggcagcggacgatagacccatgaggtacagtcacacgtcgtccaccggaaccgacgcttcgaatcccgcgacaacaccgacatctgcgtcgcacgaattgttccataccgccgcgatcaagatgcatagcaaggatgtcgaggcgatgcacagagcggctcagtccggcctcgctgccaatccacttgggtcctccgcgtcgggccttgcgggatcgcaaccgcctcgaagcctgagctcgtccgtctcgaaagagaacttacgagcacccgggagtctatcgaactctcagtcgggcggatcgcggcgggctcgagacgtatctccgccgaggaagagtcccttacaccaggtgacggggttcgaggacgcacagcgggaatggcaggaacggtcagccgacagtcgggatccggtgactgggtttcccctgcctcctaacgccgtgcatccgagctcgtcctacacgcagactcacgggcagtccttggcaaattatcggtcgcagaatgccttgcatagccgttatgatcaggcgctagatgacgagacgttgggatcacctcacgggtcaagtcctgtctcgccgttcaacccaaggtccggcctgacttccttctcaccgcggggtgcaagtgggcttgcagctcgacaccctggcatgagcggtcgagccccgatcggggcggcggcatacgatcgagccaactcaaatcagcatctacagtcccctgacatgaacaacctcggtggtagccattctcattctcaacccgagatccacgatatggcaagagcgcacgaggggggccaaggggagactgccggacgcgatcttcgcggggcgtatggagccgaaagtctaggacagcaacgtcccaccatgaactggcagggaaaacccatcctacaacgagcctggtctgacggagccgagcatatcgtggccaaccgaagggtcgaggatccgagggatcggttgcaaggcttcaaggaggaagacgagcggtatgggatgcagaacactgaagcgcggggcagacggatcgagaacgatcgaggtgatgtccggggacgggcgagtgatcaaggtaacgatttcgaccgtccctttgcaacggtaggttccgcaattgagagtgatcatccaaaggtccatgcactgaatcgtcgaggtgaccggcagtccgcggaacagacggccgactatgtcatcgctgtcatcgggcaagccctggtcggtaagaccacgatcattcgtaaagctttccgatcatggggtctcgtcgagccaacgatgagtgaagacgaggacccgcgaggtaacgtccagcagtacaccgccaatgtcgaaactggccagcctcctcgcatgcgagttgtccaaattttggaactcgatctcaggcttgtccaggtcggaaaccgagaagcgcgaggttcacttcaccacatgtggccagagggcaccccgcgagtcgacggggtgatgatatgttatgatgcaacgtcgtcctcgtccgtggcggggctagccgaggctattcgtgagtgaccgttctctgctcccctagctcatctttagggacctgatgtagatttcgatacgcaggcgatctctgcccggacttaccggccatggtggtagcatgcaagtcggatccagacgaggatctggctgtacaaccgctcgagggcaatgaaataggggctccattcaacattggcttggtggagctctccagctacatgcctcagggcaagcacaagatgagaatgagtttcggctggttactcaaagcgatatccaaggagcgccggatcacacgaccgattcaggcggaagttgaacatctcgacgagaatcaggctcgaacgagctcggctctgcatggaagcagcggaggcaacgagcaagcccatgagtggcatcgtccgaccgaacgaaaacctctgtcagatgcgaccgccgattctgacctggtcataagaaggacacagtcgcaaggcgctgtacggatgttacaaagcggctcgatgacatctcgcgtgcgacagtcggccctagaaaacaagagtgaaagtctaggtacaggggacgcacggaccgacgaatccaaccgtgatggttcgcaattagcgaatgcacaactggctccagaccaggtcaatcgtggagcgaaagaacccgaaactggcgatacagctggccccgtgaggcgagaaaagccgccacagatttcggtcattaccagtggtcgagcggaagctcagaaacctccgttagtagtcactctttgaaatcgaaccgagaggtcacacagagctgacgtataaggttaatctcagtaacagtccctcgaacccatccaaatatgtcacgtttgatgagctcgcggagcaattgctcagggctattatgaccggatcgggtcagttgcccgacccatcaacagagtatcggcacgtaccaatctcaccgatattgttatgacagacaacgctttcgtgaacgcgttctttctcacctaccggagattcgtagaaccccctgaggtgatggacaagatatatcagcgttggtcaggcatagccaaggcccacgggatgacctcttcgtctaggcaatggagttactcaaggcaagtgcagcgcggactactgtgtatacgccatccacttaccatgtcgaccttaggctgctattggcggttgtcgaatgggttcgcgtctatcctggagatttcgcattcgttgatgctagagagcagttaatcacgttctaccgcgaagccttgacgcacgcttatctggggcatttgtcagcggaccttgccgattctatcggcaggctagagcatgtccgggatctcgacgaatcatggagcctagccagtcgtcttgccaagaaaaatcagagcctggcaccatcagggcaacctggcggcaatactccgaacagcagtgcatcgccctactcgggcctcgatgatacgactctcgaggcactgaacgcgccgaagaacgtcgatcctatacgtggacagcccttggccagagcaccgtcgaccttctccacgtctaccaaagactcggcgtcggcctacgccgtgatctcgccaagcgatacatctcagataggaagacccagcgtcagtagccccccgaccagctttgcgaatggtttcggtggctccacgggatcgcattcgatgagccgcaccgataccagggctggtaggggctcatccgagggttcacgttcggtctcagaggtcgaatcggaaggaagcagacctttcttgagatcgttgaccttgctggaaggtctcgctgatcttgctatcgctgtcgaactgagcaaggaggaatggcgcctcttttcccaaataagagtatgtctactttacttcgtgaacgatgctttgacccgtactaacctgtcccatcttcagccccgagactacttgcgccaagtaatgggcggggagaggcattctgcaattgggcagtctgtggctcactttaatgacatctcggcctggtaggcggtggcccccaaccatcttgaatgggattatgagctgacttccaggatatcttcttagggtggtcacgctagtgctcggacattcgcgaccgaagtctcgagccaaagtatatgagagactatgtgcgatatgcgttcacttgcgccgcttgcacaactattcaactctatgctcaatcaccgccggacttgacaattttgcggttcgccgattagccgccacgcgtcagcttgtcaaaccgatgtacgaaacggacttgcggagttacttggagctcgtcaatccgcaagcgagctatagcgcataccgagcggctctgaagcaagacggcttgctgggtaacaaagcgattcctttcctgtaagctcttgtccatgtgcgtcgcttgatctgccacgtacttattagcactcgttgctgtgtacaatcgatagcggcgtagtcacgcaggatctgaccaaagttcacgcggtgaacacggttgacaaggacgaaaaggatgcgattcattggaagaagtacgaggtcatcgccgatgcccttggcccgatctcgctataccaatcgagacaaaatcccttcgccacgcttccgggctcgagtgcagctcggcagatgattatcgattgtccccgcttggacgaggatgtaagtgggtatggtgcttgtgcctaccagggcaggagactgatgcccgtccccgcaggcgatgtatgagcgcagcaaacacctcgaacccgatgcccactatcacaacgggcccatgctgagcagcaactttggctcgcaatctcagcgtggcctcggaacaggtactcaaaaattccagtctccaggagcgttcactaacggtggcttcgggttctgatcgccacttcaggtgtagcctggtctatactcacctggttcccgtcagccgcccggctcctgcggctcggtcgaggatcgaaccctttgttgcagggtatctgtccatatagtcgattaggttcactgccgtatatattgtattagtttccagatcttccaggttgaccgtttcagagggagaagcgatccgggcttataggctctgtggaagcaatggctttcgcagtgtacaattagttgtcacatatacaaatatctatacccttcggcgtctacacggatgatgatttgactacgtcatgagaatatctcgatccaggtctttaatccccgctcgatctggtagagcgttcaacttcatcctgtccaccattgttcccgtccgcttcttgacctgaccctccatctcggccttgagaatcttgcagccttctacaccgaccgccaacatctcttcgaatcgatcgatatgtatccgggtctcaagtgtcgccaacgttactttcccggtaccgggtagcgaggcgaccacgaggtaagggatgtcggattcttcaggcgatgacaaatcaaggaggggttgcgtgaggtgtagaccaacagagagggaggtgatgtagtctgtcatggcgactccggcatcaatcaaggccaaggtcgttgcattgatagcggtagggagaatacctagatgtgcacacggttggtgccagtcagcctgatgaacgaatggcgtctggttcgaataccgatacgaacctccatctgatcccaggacctgaacgtagatcgagatttcgcttcgaggatacaggtgagacaggatgacaggctcaaacgtctgcctgatggacgctccgatctcggtcaatcgtctgcaagatgaccgaacgttgatgagcgatccactgagcctgaatgacttttcaagggccactcacttgtcacctcgattccgctgtccgactccgggttgcgaccaccctgctacaccgacttccaccaccaagtttgctcgatcgtggatggcgttcattcgactccgaggctctcttggtccgaacaccgagacggtgaccgtggtgaggccctgttgcatagtagccgacccgtccgcgtgtgcttgaggtgagaaggtcatcgagacggatcgaagttcgtatggacgtctgccatcgacacgaaggcctgtaagtgagagttgatggtaggaaccgaggcgataagttctagatcttaggcgaaaccatctggcagaagctcacctccttcattcagaatttcgactcttgacgatgaagccatttttaatggctacggtgtggtaacgactgaatgagattgtagacgctataaatggcaagtcgtacaagttgcgaatcctgactctgatggtgtacgatgtactggtcgagcagctcgatccagaaccattcaaaaatcaagaagtcggtccagagtttgggaattcgcaacgcaacctaacatgacgacgcgatctttagcgagtcacgtgatccgatgataggctcaaggggctgaaacgtcgattcaactttcatcggaattaccaggctggcgaacatcatacgtctagacaaataagacgttcgtgctcctcggtctggcatcataaaagaatcggtatacggctgatcgagcagccgaagacgcaggatgacgaaagcgcgcaccgctgcatcaacaaaggagagtcgagagcgttctcgacgcagatatacgccaaagccgatcgcatcgacaagatattttcaaatgaccgcaggtacgactcctacagattgtcaatttagtggtatatccgtgaactcatgaacatgatcccgaacgtccgccacaggtctttgcaatctgttccacaaagcggattgtcaagcgcgtctacaggaggacctgcgaggcggcccggcaccgtggatcccgagaccggggccaacacacctcgggattcggacttcaagtttcgtaccatcgaaaacctacacgaggtgattgtaatgacctcttcgtggcagaatgatatcttacagctttgggcaatagtcagtagtcagggttaaagggattccatcgcatgagcgcagcgcaactgaagaggcgatccgcagcgggctcgaggaaggttagccaggcttgatcattgtgttagcggtaatgatctgaagcgattttgctgccgatgcatttagccgagatttcctacagatcgtcggaagtacgaaagcacgagaaccaagaaccagatgatcgactcgaagcagatgaatcgatttgcgcgttgactcgagctcaaaagctcgaccttgaagcgttcctgagcatatgcaacaaagccatcgtgagcatccttttcatcgtcgagtacaagctttgacggatggcgatcttcgcagtcaaaggtccctggagccaccatcgtcggtagcacgcaaggctgtgttcttgattggtccacctcgaatgtccataatctcgtctacagaccggattcgggacccccgactcctatcctggagaatgacgactacgatgcaggggcgccgagaattgtgatcagcaggaacgagagtgtagacgcagggatcaatgttgtcagccatgtgtgatgaaatgatgaacgtattgatttgatctatgtatgccatatgtcctcgcatcgtactcacgatggttcccggctgcgttcccgtcaacaagacaaagggaaaactcgactcgtaccagcgtcctctcatctctgatgcgatcgatcgcgccatcgataggctttgcggccctccctacgtgtgatcgtgcagtgacggccgcatctgcaatcccggagactgcggtatgaaaaattgcaatatcaaagactgcaataccgaaaatggatcattttcatacgcctcgtcgaacaggtcgacgtcatctcctgccacgttagggtcacacctcctcaagagaagtctccggggggagacgacaggatgctcgacctctgtgacggtgtcagggccggcttgaacaaggagtccgtttcgtgcgcgaaaggctctccgtatggtcatgctctataccgcgctcgagctatgactatatgcagcttctcgtcccgtactccatttacgttaatcagtctgatcgacaccaatccttcagctagcgaggcgaggcagaacaacccgtgagcagacaccagcgcaagtctcttttattcattgatgttgtgacaatcgtgaagcttggaagccaatgacaagtagaacagtctaagtaccaagcccgatagatcatctcagtttcgttgctctcgtctatgatgaaacgatcgctaccatctatgcccgcgaacccatctaaactcgggaggggttgcgctggagagcggcaccactgaatagtagaaaagcaaaaaggacatgagcttctgaagcagaccgaaaacgtgcgtgcggccgaaacttacgattgctgggcctggatggatccaaacctggacaactcgttctggttcatgttgaccttttgacccttgccgagaccggttcggttcaaggctcgggacaagaagctggttcggttcgagtacaaagactcgtgcctcgaggcggtcctcctgatgctggtgtcgacatcggggttggcgatggcagccttgcgggcctttcgcttctgcaaccaggcaatgatcgagtacttgagaccgaacttgacaaagtccatgggcatgaaccagatgatgttccacacccagacaataccgatccaacctccagagattcctcgaacgagggtgaagccccagtcaccgaaagcggcaatgatggaggagatcaactgggcgagacagaaggccaggaacaaggcgaccgagggtcgctccatgaagaagaatccgtgcgatcgggtgacgaagatcaaggcttgcgagatgatggcgacctggaggtagataatcatgtgcatctcacgggcgttggggtccttgtaagcctcgactccgaacttgtcctcgaagaaggtggtgtcgtggatgacgatgaagaggacgatggtcgacaaggtcaagtagagtccgtatccgataccgtaggcgaagacctcggccaagtcccaagagtcgggggtgctcgagggcaagactcggtccaacgacaaggtcatgatggttccgtcgttcaagacggcgatgatcaagaccatgaagggagggaagttgaacttccagatgaaagccatcaaggcgaagcagacgacgatacggatggtgacggcacaggcgtagacggcgtagttcctcatacgctggaaaatgattcgggatcctcggatggcgtggacgatagtcgagagaccgggctcggtcaagacaatgtcggcagcacctcgggcggcatcggtggcaccctcgacggcaataccgacgttggcacgggacaaggcgggggcgtcgttggcaccgtcaccagtcatggcgcacaagtgaccgagagcctggatacgcttgacaatctcgaacttgtgctcggggaagacaccggcgaaaccgtcggcgtccatgatcatctcgtccaagttggcgtgcttgcctccggcaacgggaccgtccttcaagaccttggcggggtacatgtggtcaccgagaccgagacgacgtccggtctccttggcgatagcgagctggtcaccggtaaccatcttgaccttgacaccgagagccatggcgtcgtcgatggtctgcttggtgtcggatcggggggggtcaaagatggacaagagaccgacaagttcgaaaccgttaccctgagcgtcgggggtgtcaccgaggacctcctcgtaagcgacggcgagggctcggagacctcgtcgggcaaactcttcaacgtcgttctcgagctggtcctcgatctcgttcgacttgtttcgggagcagagttcgatgatgataccggtcatacccttggtggcacgcttgagcttgccggtagactcctccaagtaggtgatctcagtcctcttgtcaacggggttgaaaggcttgaagtccaagagcttgattccctttcgggccaaagagggatcggacaaggttccaacgacacatccgtcgatggcgtcctggttctcggtacgggaagagtaggcggcaagcaagacggtctcgtcaacggagaagggaccgtaggtcttgacgttctccttgtcaatggtcaacttgttggtggtcaaggtaccggtcttgtcggaacacaagatggtgactccggccaactcctcgatggcagtaatacgggtgacgatagccttgtgcttggcgagctgctgggcaccgacggccaaagtgacggacaagacggtaggcatggcgatggggataccaccaatgagcaataccaaaatgttgtcgagaccatcacggtacgagtatcggaagtcggcgtaaaggatcaagatctccaaaaggacgaagagaccgatcgagacgagacagaaagttccgatcctggcgaggaccatttgcaagtgaccagtctggtcgttgtcggcaccgacgagggtggcggcacgaccgaagaaggtgttggcaccggtagagataatgataccctcggcctctccctgcttgcaggtagatccagagaaacactcgtcaccaagcttcttgccctgaggcaatgactctccagtaagagcggcctggtccatactgatgacgtcgacgaatggggtcagcgctttgtctagaagtcgagggacgaggcgactcgacactcacgaaacatcaatggcctcgaccaatcgacagtcagaggggcagacgtctccgtgcttgaaggcaaccaaatcaccgggaaccaactcggaagactgaggatatatggggacaggatggggtcagtcagatgctgtcgaacaaggccgccggcaaagacgcttacctcgatctccttccaagcgccacctcgcttgaccctggccttgggggccaaagagtccatcaaggccttgacggcgttaccagcgttcctctcctcgacgaaaccgatagtagagttgatcaacagcaagaggacgataccgacgaaatcctgccaatcaggaggtcggccctgaccgttggaaagggcgatggcgaccaaagcggcaccctccatgacccaggacagggggttccacatgaaggacaagaactggaggaaggcgttctccttcttggcctcaagctacagacgaacagggggaagatcgtcagtatcgtgttttggaaagcaagtggtctgctgacgaggtcggcccggtcgcggcccccagtcgcgcgcggaacgccacaccaagctgggattcgaccgattcgacctcgaccacaggagacaatgtcgacataccttgttgggaccgaagattccgatacgcctgacggcctcttcctcggtaagacccttgtcgtcacattgcaacaagacaaagacgtcctccatcgagacgtgctcgatgtcgaccttgtccttgtcgtagaggtctgatggaatgaagtagacgcgcgggaaggaccaggtcagccaactcgctctgtgattcgcgcaaaaggaatgtggcgtcggatgcaacgtgtggaagctatttgcctccgcgcgcgcacgacccttttccctctccccgcccccctacacccatcccgccaaaacaacactggtcgctccaattcaggcaccggggagcgcaccgaatgaaagtgaaccagctcggattcgacgaaatggggaagagggcgaagagaggtaggtaggtgaaggagaaatcgttcactcaccctcgacggtaagtccaatggtgtcaagggcgacgttggcagtggcaacatcgtgagcctcgtgctccatgtccttgtactctcggaccctcttctcagcaggggcaccgccgacggactccctgtgattgcgaaagaacgatggatgacgagatcagtgatcgattcgattttgctgacaatgcagacgaccatgatgatgatcgctgatcaacgctgacgactactcacttgacaggagccgcctcgacgggagcgaccttttcgttgataggagcgctcatattgatggtcgaattcggtggggactgtcgaatccgataaaggtgtagtgtgtatgtgtagtgtgtagtgtagggcgaggagtagaaagatgcgagacggtttgacggtctgctctttcttgtttacgctaggtgcgactcccgggttgaggtgagggggattataataaaagagagaaaaagaatgaccacgatcgaagggtgcgaagcagactggcttgtcttcttcgctatatgaagaaagggggagaaggaggaacggaaggaggaggggggtgctgacttgaggaggttgtcgaaaggatgggtgtcgaaggggattttcgcttttccctcttgaaaggactggtcgaccaaggtgggtgggtgtttatagcaatctgggattgttagcgattgggcgaggcggtgggaggggaacggcgggtcctatttgtatctcccctcttcgctcgagatcgtttcgatgctcgccattggttagggcgcgggatgcccacaggcgagagccaggtggtggatgggtccaaaacggtgggcgaggccgttgccgagaccgagagcggcggcggctcgacagaccttggactctagtgccttcgtctcggagcgtggttcgccggagcagcagcgcagctgaaaaaaaaggggaaaaagcgaggaatagttgccggggtcttggccgcgcggggccttgtttccaccggaaacgacgagccgagatcaaattcagcacggtcaggcagccgaggaccgggcgaggaaaatgatcgcgacaaccgaaagacgacgacgagcagatgcaaggggcaacggtttttctttcacttgatccctctgatctcgacaacgcaaaatccgatgaaactcgggatggacaaacgaaactcttggaatcggtcgcttgcttgcctacgttcgtgatgaccttcaagcccagctgttacataacacgtgcgcctcagacatcagttgagcccgacctcgatccggtcaaatatcgcgtttcgtgtcaacccgctgcatcagggaactgtgtttcgcttcgcttgtttgttttgaattctctcgccacaccgaaattagattgttgttgttattgtggactgcattgtacaagcgagagagacggagagactcgtcgacctttcgcctcgactagccatcctgcaacatctacgctcagagcaccgcccgccatctcttctgattattttgatcggggtttcgccagaacccgaaagaccatggaccggccgaaacaagctctgcatcagcaattatttccacctcgtactctaagcgatcaataccgggagcgggggtcatgtgccccttactactctccgcgcgagattgtcccaagcgagatggaaccatcacgtcaccggcgtttacatcagttcgccgctctcgggaggttttcttcgaggttcgaaattgaggatgaacgacacaccgtgtgagcaacggctgaactacgggttcattgagtgttcgattcaccccccacccccacctgcccccctatcatgctattctcaggcgcaagcggacactgaacattcaatctacggtcgcacgacctgcttcctcggtccggcctctgcctggtagacataatcgcctgagaaattgtgagcgcccccgatcatttcgatttcgaactctggatcaacctcgggagcgcgtgggttcctccgagccccaagcactttttttcccactccccagcgtgatgcatttctcgctccctctcgtcgtgcgctacggtcgagattgaatccgctagcgtggagtcgctcgaacggtccgggaatcctccccatctctcattcccctgccctgcagccctcttcgaaatcaaacattctgttgagatacgctccggtcccttatcttttcaaagactcccaagccaggaaactcgccgtcgagagcatcagcaagattcgaaatgcgaatgatgaggcatggtgaggtgctcgagatctcgctgggctctattctccatcattgtcaaacacttcgacgcttcgggtaagccaagggggatcccgtatttcgaagttcggaggaccgatggacgatcatcgtccgactctgcttgccgcgcatcatccccgcctttctccatcgaaacccgcggggcaaggcggccaggcatggtccagcagctaagggcgatatctacccttccgttccggagcatggtcatttcggtaggaaggacgactgacatgatcgagaactcactcgcgcctatgatgcgaggtcggtcgcttgcggatgcgtgaaaaatactacccgatagcaggcgacgtcaacacgcaacgtctcaaacgggttacagtctatcttcgccgacaatccagcccgttctactttatcgccgattcttgttagctcgctcggcaagcattcacacaatcgatatcgatcgtgtttcaccgcattacaaccttcggttgtttggaacgaaccgacgggcccgacttctggttctagtagataatgatgaccccgccggcacacacctcgtatccacatcctcgtggttgattgtcgtcatcggcgtcagtctcaacatggaagcgagataaccggagatgaccgatggcgggcatgatccacgttcggcagggttcgagaggctatatttgggcagccactgaaatgaatgatcgacggtggattttcgctggtgttttcgggctccgtcatcttgaattcagtcccaatcgagccgagaaaatgtttggagttcgaaggagcagagatagtacgtgtacgcactgaacggccgagatcaatgtcgaccgggaatggacttatcctatccggaggtgagcgaggggttccggcccggaaaaccatgtttcaaggcgaacatgaaattatgcaaatgccgggccagagataacctcgattgttaagcgaatgaccatccgctttcgcttctctcggtggcgatgggccctagattggcaggggatcgtcatcgatcgccagaatttgtcgtctagcttataccgaagtcgcccgtgtcagcttcccattgaccgcttcatgaagatagacagagcggcgacaacgaaggtcgttcgggtcgtttcgacagagatgccaacgcatctagatcaacgaatcatgcggtctagcctatcaagcgcgcatccgagggtcaccaaagcagaccaaggtcgctagtctgcacccactccagccattcggcgcactgcaggtcgtcgtcttatcttttcactcgagatctgggtcgttggcagtgtcatcatgggcgtctaggttatggaacaagcacgagctcgagtccgccaacgatagtaataccgggcacccttttgcgggcatcatccgagacaaaaggagatgttgcactttgtcaagcgccttgcaattcgtcgatgcgtcggagcagctccacaagcgttagatgacatcgagattggctggagtcacatcagcaagatgctggaacactcggcttgagtattgatgtaggtctgctcgacacgatcgactgtccaatacaatggggtgtcacgggctgtcgacagagctgatcagctgttcgtcacagcagcgaggtgccggcgtttcgtcaggcctcgcccgcattcgtcatatactatcttataccctgacctatccttgactcttcccataaactttctgcccatcatatcccctccaatgaagaattaatagctctgcttcaggaaccccagcgcaagcgttccaaagcggacctcccgttcctcaacagcccaccctgggtagtgatattgcacaacctctaccccatacggctgccgctccgcctgacttggagcgctcagcccaattcaaccttgtccaagagtcgaccacgaaaaaccaatgtcagacacgacaagacgccgtatattcgtaaaagcataaagtcgttatccgacgcgacgacgttcagatgacatcctgattaaccggctcaagcctttttctgactcagttcgaccgccaccttgaaagcgcctagcaagctggtcaattggaccttttccgatcctcctaccgacaaccggtgtctgcggggaccaactccgttgagctctgagatctccacgtttggcagacagccgtcatcactcactcgcaagtcgccaaagcgtctaacaggtagactctactctgagctggaagctcgaccgtttccaagacctcgtacgtgcctgcgatcaagtcctgcagtgccagtcccctatccgtcttcaatttcgtgatgtctatcgcgagactggagcttcagccacggtgcctctctcgattcgcgaccatcggtcacgtcgactcacattcgtaagatgtcccaaattcgtccctcaacatgctctgtaccacgctctccacatccttggggtgaggatttcccgtacagttgtacacggccgtctcgtcgacttcgtcgtaagctgcatgacaggcctgtaagacgttgagcgcccttcgcatgtcccccttggagagcttcaggagggcttgcttcccgtcttccgtcagcttgaccctataggcgacgaaggtgatcatcagtcatctatactacaagcgataacggtctatcattgcgctcacccttctcgctcgaccacttgattgaccttcttctccacctccttttccggtaacgggctgaacctgaatttcgtgcatctcgactggatggccggcgtgatcttgttgacataattacagaggatgcagaatcggacgtttttggtgtactgctcgatgactttagcgagacacgcctgggatcagtgcaatgaacctcttgatgtcaatcgatgcaaggcacgactcacctcgcctcaatgcaccctgcgcagcttgcgtcatcatgtccgcctcgtccaggatgatcaacttgaacccctttctgaacggtcgagtcataccgtgccgtacgattgtttccgatcagaaaccgttctctccggacttgtctcctgtaacaccaccgttgctgacgggactcacgagaacaacacccgcgtcatggcgaaacccttgatctgctccctgacgacctcgatcccacgatcgtccgaggcgttgagttcgagcacatgtgagcgccaagcggtcgggccgtagatgagctttgcgatggcgaggatggtcgaagtctttccggtacctgcaaggcgtcaagacgagcaagtcagcgagggcgttgaagatggttctggccaggtcggttcgacctacccggagggccgtagaagaggaggtgtggtagtcgacccttcttgataaagttctcgactatgcgttgagatggggggaattaagccgacgagattcgtgatgtgcacagtgtgacccagatcgactgactcgttcccgtgatatccttgtgagagaccacatcgtccaacgtgtctggtcgatacttttccaccctgcgtcgtgcatcctgacatgtcagtccacctgtcgatccgaaacgacgctgttggccatctcaccaaggcagtccaccccgcttctcgatctcgtcctcgtagaccgcatcatccacctctttccccttgcccttgactcccgatccattagcctttttgggttggaagaacgaagccatattcccgaacccttccttgtctgctgaagtgcccgcttggccgctgacgatgccctgcccgttcttgccattcgagatttgctttacgccgagggtagtcctgctcgcttgctctccgtccatgtccacatcacccgtgtcatcgacgggaagctcatctccctcgacttgagcggggatggaagggttctcggcgtcgggaaggttggactccctgggcagagggctggacacggaagatgggctgtcgatgtccatcgcgaaataagcgttggtatgctagaacctgggtcgagttatttcgttggcgcgggtcgctgtcgatatctacgaattggacagagggagttggttcgatgccactgcctaagtgtctagaacagactttcgatgtaaaactgtgggtcgaatggctctgtaagggatgattgtgctcaagatttcgaacgagccataacccataggtcgttgcgatatcgatgaccctgctctatatctgttcgatcgacctttagctagctgaacgcgtcgaggcgcgttagatacgagtttgcgaggtaaatgaaggaaagaagggtcttgcgagttcaagtcagaagcgttcacatctatctcccttcacactccccctggccagtcaccaacacaatcttccttgcgtctcgaaacgacgacccggcaaacatgatgcaagaagaagacccaggagcggccgcttgggaagtaccgcaggagaaatcgaccgaagagatcttgcaagagacgctaaagaaggaagccgccatccagtgagacccggatcacacctctttagccaggtcgcgacgttcacgaaggctgaaaccttgattctattggatgtttcgtagggatgtcatcggattgcaaaggcggctaaaaggtcagcccgatctgaccgcctgatcggtcgagacgccggcctcgtaattgatcaatcgtcgttccgctctactctcctcttttcatcgctcctcccacagaaatcatggacgagatcgatcgtacggagaagaccaacgacaagctcgaaaaggagaatgaaatgctccatatgtatgagaacaacttgtgcgtaatccttacacaacgggcgaacagaagcacggtctggttggtaaacgagctaacctggtctggctcgactcgtcaacgatatatgcaggtcaaagacggcggcaggtcaatcatcttacaaacgataacttgcgtcaaccgtcgtatcttcgtcggatcgacactctccgccaacaagcacggtttacttcacgactcctcctggtcatttaccgtattacctacagctgactaggcacgaccggcacctcgcgcccctttcactaccgaaactgtatctgtatctgcaatccgccaatatcaatgtctgctcctggtcatacaattgtttaccgctcgacactgtctcatcgtcatgccccgaatcggaccttggccgacattctagattagaaatcttgcgtctcgtccagctttctcatctcttcctcggtcatcatccagtccgggtcgacctggaggtgcggagtgatacaggaaatcacaaataagcttcagcttcttgtccgatcgtttgtcttgaaggacctcgaccacactcacctcgacctcgatggacaagtcgcccactgccgttggctgcacattggcacgcccatcctggctcggtttgttctcagcttgcttttccatccaagcgtccttggccgcctcattggcgtcttccagcgtcaaccagcgagttcggtccttgacgctcggcatggccgctcccatattagccagacgctgagaagggcaagaaggttgaaggcgagacgtgccggccgttcagccgaagcacgatcttgtgtgattctccctgccaagacgggtgagactcacatcggccatttcgttgccctcgtgcccggcgtggcccttgacgtgcttgagcctgatccgagtggtgcccatccggttcatcaaggccaataggtggatcagcagatcacggtttttaaccggatctccattcgccgtgatgaaatcgttcctgagccatttaggtaggtattgggtcatgcctgagcagagtgtcagagcgatcagccatcgaacacatgatgcctacgaaggagtgacctcgtcacttgcatgatatgctgtattgcgaatccgtccgaatctccaacggcaaatctgggtgaggatgttcctcgatcgccctgacgatggcctgcaagatcgacatcagccactagaatataaaaggtcattgatgactgcaggaagacttgccaataattctcctctattattcgtctgcaaagtcccaggcagagcttctgcgaggttcctagatcgaccaagaccttttcgtcagaacccgtcatcgactgcccgatccatccgaatttcaattccgaccctcctcaccttcgctcggcctctccctttgagccccagtagacgcccaaaccggctttcgctcctgcttgtccgttccccaacgaactcccgtcacagtagacgacaaggaaaccttcggaggataccatgtacccttcctgtaccgccagcgattccgcagtggacaaggccgagggatcctttcgatcggccagggccttggtggagggtcgtttggtctcaccgcccggctgtgaactggggccaggtgggggcttggtgtacggctcggatggtgcagcatgaccatcccgaatatacgccagggctagactttccgtaggaaatttcttatactgagccctgtgacgtcgttgttggcccgcatcagcctcatgctacactcaaggtggggattgaccgagctcaccctctgaactgtttgacttgcttttcacactcgtccctacagccgtgtgacggagaattttcagctagtctcagagtacggtttggtcgagagatgatcacataccacgtcctatacacacccggcttgattccagtcttcacggcataataccctcctttggcggctttcggcctgggcataaattactctcattcaacgaaacacatgccaagacggatgcgccggtacgtacatggtcttgtcgtcagtggggaagatcgagatccggaggttgaggagcttttgcggcaagggacgggtcgaaaggatgctgagcgacaaccggttgataaaagggtagacgaccggatcgtatcctctgatctggatcttagtcctatacttggttccctccttgatattaggctcgacgaggttcttggccttttgcgcaaagtgccggcgaaggctgggtgacaggtcgaccaagagggtgtttggtcgtttgcttagccaagatcgaagcatctctaatctagactgagaacgagcatgacagtgttgccgaaggtgattccaatcgattgcagacttgtcacttggatactgttacgattcaccgtctatatccaggtcgaaccggtggacccccagatcgacaagggtgaatgtacacaaccacctaccccctggtcgtaattatggatgcttctctcctcggaatcgatcattcgcgacaaagtaaacaaagtaatttgttgaaaccatcgccgatctcagagtcagtcgagacggttgccggtcttggtgaaaccagtcgagatggcaccagtcttgttggaaccagtcaaactgggggtcttagaaccagccgagatgggatgggtcttgttgccggtcttgccttggacaacagcggagtgggtggcagaagcggtgtaatgacaaatgacaagcgcaaagaaaaatgtaaagatctcgagtgaggcatgtgtgtctggcagcagtagtgtcttgaccattcgcatcgaatgtcttctcgattcgaacagcctctccctatgtaaaaacaacccgcagcttgtcttgtcgcttctcactgaatctcttcccactcgacgccaacccactcctcgccgtacccgacgcaatcgcgctcgcaaccaaagaccatgatcgtcccccattccatgcccgtctcggcctttaactcgtcctcttctcgttcgaccggcgtcctatcgtcgtctgcagcgtctgccgtcgtcgacttgggcagatccttggcactcgcccgaccgaggaggacagccagttctcgtcgcctctcctcgtccgtctgcgtcttcttcttcttgctccgtcgcttcttttcgcccgtcagcgatagttgctccgtcttgagctcggcgatgagccctgggacgagttgcatctcgaacgtcctcttgcctccacatcgagggcaagcggggacgacgcctgtcgggtcatactttttcccaaagatgttgacgttgggctcgagatcatcttcgtcctgcgcggaagcatcatcgaggtcccgcttgaacaaccgcttgaacaagtccgagttggacgagtaaggcagtgggaccgcgccgaggtcgtacctcaagacctgcccgctcccatcttcggccctgttcaacctctccaggaacctctcaaacacctcgtccacccccttgggcaagaccttttcccactgttcccccgcgcctcccgctgccggagcggcctttttacccgcctggagctccttttccttgtcttcggcttcctgtgcgctcatctgtctcaccctctgcgcggtatccccagcgagcgcgttcggatcggcaggaaggtactcgtcaaacgtcgtcaagtactggggtggcaagtaggccgggaaaggtgccgcgaacgtcttgcccggaaggtctggacccgaggtgacgaggacgacgggtggtggtgacgcgtcctcgtcgttcttctccttgtcaccgccgccggatccgacgagggacaacccgccgaaagcctcggtgggcgccgtactggccgcgacgctcgagaacgggttgaacgtaggcatcccatccgcgctacctccgaacaaggtggaccctaatccaccgcctggtaggcccgtattggtcgtcgaattcatctgtcgtgtcgtccacccccagggaaaaaggacgagcgggcaagtttcggcgtcgcgatgagtacgagctagaccggaaagatgggtcgggctaaggggacgtggaggggggactcacactgaacggattgaccttttccctctcccgcctctctgcctcttccttttcccgcttggccttttgctcggcagcgtccgccgcgtagacttcattcctcactgatgctcggtacgctcggacgctgggagggtcgtgacgtacgggaatgacaattcgacgcaagtcgtacgagggcgatgaagggagtcgaggacaaggtaacgacgacgacgaaacccaagcagcgtcacgagcgagtgacccaggtggaagcacgaatgatacgaaacgaggcgaggcgagcaagaggcgcagtgagagagagaacagaacgcggggtataagcgcatgattcttcaactggatatgccataggagagataatacacaaagagcacgacgacaaggtacaacggggacgactaggtagagatgggtatgagacgggcagacgacccggatctttctttcgagctcagctctcaccgtcgtggtgttccctggacaccaccggcaggcaacgggggggaaaccaagggggatgaagagaggggggcggggacggaggactcacctgttgggtttcctctgacaagaccctcggggacaggcaaacacgtagacgttgcgatcattctcccctccctcgggcgggcaatagacctgggtgaggagagggatctggttcccgcatgtcccgcaagtgatctcttccggctttggatggctgcttccctttaggttcggattcggattcgtagacgagcaagacgcgggaagagggggaaaggttgggtaaccgccgaggatgctggtcaaatgggatcgggcgtctttcgaggtcgaggcgatcggtccgtccgggatggcgaggagggtggtggtcgggaggaaagacgacgttgaagagagggtgggcgaaggtggttcgggcatggtagtctagtcgagggggggtgtattcaagtggaatgtcttgatagtacactgtttgaaaagacgggtagagacaagcggtcagtcatcgatcgtctcgaacatgaacacgcccggcgcttcgcgctttccttccctcctctccgccaaacgctggaaacatctcgaccatcgacctcgggatcagaatatattaatcgccaaactaattgaagggtatctgcaagtcccctgtccactcgaaatgagggcgcagggagacgttgagtctcgtcatctatgtttgttcatcatttcggtcgatccgggggttctcgcccgtgtcgcctatcgaggtgtacgtggtttacgtttgatggtgtgctcgtctgagcggagatgaggagaagaggaggaggggaaagacatgtatgacgaggcgtggatgcttacgagttgcgggtttggcgagtttgaatcgtgaaggatgcgtatcttgtaatgtgtatgcaagtaggaaggtgagttagttctcctttggctgctacttgtactctggtcgctagtcgacaggttttccgcgagaacgagaaccaaaagagacaaagcggacaggttagggtcacgtgaaaagaaaggcaaagctgtgtgagctgagactcttcgccggttgtcatcctactgccgtcatctctcgacatcatgacgttgatatgccgtagtcaagatgtgacgtgatgatgccgtagatgttgtcggccagcctcaaatggagcgagcgagcgagcatccagttcatcaatcatcccatcacgcacctcgacttcgacctcgatctcgacctcgacctaaacggttcacagctgtttcatctcgcatctcgagttaccagcccgacacctctccatccggctcggtcggatgcgactacccaactgtcgcttcagagtcgcacagttctacaacacagctggctcgacccccttgatggccgtcgcgtcggcctcgatgtccatgtcaatatccatgtcgagcatgcgtcccgggtcacctttcctcgatcatgatcgcgatcaccgtcgacacttttatcaagagatgtatcaccacgacgaacatggatcgagttcgagttcgacaatgaggacgaacgagcacgacggtgcagatgcaggaaacagagcgggagcggaagccggagccgggtacacggacgagaacgtgtacctttcacaacaggggatgagcagggcgaccaaggagctcggaatactcggcaagaagaacaggtgagcgacctcaccgtccatctcgactcgggcaaacgcacgcgccccgaactcttgctcgtcgagcttcacactcttgtcgatcgggatactcatattctttggttgacgatgcatgacggacggatagtgcgcctcttccgctagcgagatccaagcaacatcggcagatacctatcctgggttatagtcgggcgagggaagcttcgagcttgttcaaccctacggcaagatcaggagggccagacaatggccaggcggcgtcgtcgtcgagattgactgcaaagacgtccgctgagacgactttgaaaggctctggatctttgcgtccgatatcctcagtgtcgaccgctggatctacctcctcgggttcctcctccaacgtgaaaccaacaccgactttcaacccgctctcgactttggaatcaaccttgaccgtacatcgaacagaaccaggatcaaacaagcatcgaccgagacgcttggaactggtgccccgggtcacaccacctatcaccaccgtcagagcattaccgctcggtctagaggatcaatacgttcgactccctcgcaaggacgacgacgtggagacgatggacacctcttcttccctgattgcaagttcgacccgcccgtcgagtgtcggtgaggacatccgctctagtcccagctcagggacaggttcaatcgttatgcggtgcccgagcacgagcgggatggattcgcctacggtcttcctcccgcccgtcgcggcgtcgacggaggatgtggatgggcttcccacgcctaacacgttggcgctgactgaactcgggagaaaggcacgtgatcgcgccgttgcccgagctggtacgtctacgtcggtcccgaagcagaggacgacacgggtggagaaggaccagaagagggacggagcgggtgtgggaggcaagagcctgttgcagaggttgggcatgctcgatgcagtcgaggtgggattgataggggtcgatgcttctaggggggacgttttggaagaggagccaagatcgaggtccgggtctacagccgagtctatacccaggtccaggtctggttctaggtctagatcgataaccttgcctagtctcagcggaggaccgggcctagcctctcgatcgacctcgttcgaacacgtcagggccatgtccaccgagcgaaccgtcacatcccggccctcgtccccatcagtggaccagacactcggcgatgaggagaacgaggtcgacgccgtactgttggcggacgatgtatccatgggagctcgtacgccctcgacgacagaggcgggggagaggccggctctccttcaggtggagacgactgaacagaggatgcaggcgttgagggacaaacttttgagcgacaaggcgagacgtcaggcgggtccgtcgtcgggagatcaggccgaggccagtgcagcacgcagagcgggtccgactggaatcgagggggctacgtcggtagatctggattcaagggcagagacggtcagcttgaccaggaaacgggggaaagacaagaaaagaccgaacgatacttcgagtcaaggcaaggcttccgtcaacaagacgatcgatcgcaagccctcgacggcagctcccgcacaatcgtctggggtgcaacagggcgcgagtaaaggtcccgaagacgggtcgcgagctcgacagaaaaaggctaatagaaaggacgaagaagaggacgacgggtacccgaaacgccttggcccgaacgaacccccgcgagacgcgtctggggcgatacgccggttccaaccgatcggcgaatcaatctacgttccgcactccctgaaacacccctttcgactctacccgaacgggaccgcgttcgacatacggcgggccatcaaggcaaacttgaccactcacacactgcccgacgagggatactttgacattgcctcgatgcccgcgtgcgaatacacgagcaggatggtcgagtttcaggaatcgccgcaggatcagaggaagctgttgacgctggatttgaacgggtgtttggtggttcggagcaagcacaacaggcccggtgcctttcgagccgtgtaggtccccctcgtttcccggccagctagatcttccttctgcacatacctccgagcctgacactatcgctcgggttgcgctgcagtcacaaacgaccgttcttaccatcgttcctgggatacctcatggctcccggtaatcagtcacgagccaaatacgatccaaatggcaaaaaggtcaagtcgggtcgagaacccaacgaggacgatcgacaaggactggagaggatgaggccttatgaagcattcgtctggagtagcgcccaacctgaaaacgtttggtccatggtggaccgcgcttttgagaaccacgcagatctgatcagtccgaacaaggagaaacgacgcgttgctgcgaaaaagattcgaaatgtcccgctcggcgatcgaccaggcagactgttgggcgtgtgggatcgcaaaagtctcgggctctcgatcgaagactttgcaaggaagagccgcacctccaaggatctgcgcaagatcctggatgcgtttgcagagacggacagcgcgctcccttgtccggacccatcgttcgtcccgcaaattttcaacacgctgctcctcgacgactctaccgggaaagacatgaaatccggatctcagccgtggaaccatgtgcccctgccgccgtacgagatcgaccacaaggaaagagacatggaatttattcgagattacgcccaggctcagaaagtcgacctcgacgggatcgaccgacgattcgacgacagcataggagacctacaggcggatttgagagcgagggtcgccgtgctctcggccatgtttggttcggacccgcttcaattttacgacaatgtcaaggctggtcaactcgtcgagaccaacatcgacgccgcgctactagccgtcatcggaatcctcgccgagatgtcggacgtcatgatcgtccctgcctggatcgccgccggtggtctcatgccgaacatcgaatcgagctttactcgagaagatgccgccaaaggatgggaaaccttgatcgccaatgacttgtcgctgcctgctctaagcgagaatgagaccagcagagccgaagacgaagcgaggctctggcgccgaaacgtcctcgtcaatgcactcgacattcctgaactttcgcctgcgaaacacatggtcccgcaatttccaccatcctatcccgaatataaacactggttcgagagccccttccacgtcctctactgggtacgacggggcatgatcgctctggatgaacgaggcgtgcccatcattcacggtatcgtccctacggctaaactgaacccatcgtcgcctcgaagtagtccggcccgacagtctgaccgcacgtcagatcgacgagccccggctcgaggaccctacaacgacacgcaggactggagacgtggaggaaccggatcagaccgtgcacgccacgatcgctacgattacaccgatagtccaggacggaacgtcggtccgaggtctggtcccggtcgcgaactcgatcgaaaccggccctggtcggaacaacaggtcagatacgacgatcgagatggacgcgaaaggaatctgtctgatctgtacccgcctgacagtcgccgcggtcctcgggaacgtcctacaggaccaagggacgaccggtcgaggtccccagtcaggggcagaaccgattcgagagcttacgggaggagggacgtgaggagagacgatgaacatcctcgtcatcgacgttgggagagccgatccatgagtaacaagtcgtactcgccaggcaggtcgatgtctctttccatgtcgccgacgtctagggagtatgcgatgctttatgcgcctacgacggagaagaatcgctcgagggaggcgagcgatggttcctaccgcaggcgattatcgaggagcaggagccgaagcaggaaccggatgccaggacgggctgtagggaggagcaggagcaggagtagaggtaggccgagagacatgagccgggagaggtacctgcccaggagcaggagcggacagagataccggttgagaagcaggagcggcgatgaatggagacggggcaggggccaaagcagggcgcccagtccacgaaggtatcgtgaagatgacctcgagggtcctccgtccttctatgagcgtggaagagaagcaagaaggtattcgcctagccatcctctgcatagataagtgagagtcgagggagaccgatctcggtaattaccgtggttccacgcagtgcgtgtatcagcaacgccccaagtcatggtgtcaaacatgtcgagctacctagttgtatgatctagacaccgcatagatgcttgtcgccaacctagatcatgacatgtccacatcgagatcgatcgtttgactgcgtgacgcgtgagaaagcaatcgattgattcactactactgatgccgatcacctaactagcgacctcgtctctctgtctctccacttttggcctccaccccatcgagaagtggaggaaaggggacattcaaggtggagtaggatcattcattcagacacacccacctctcggctcaacgtcatctccctttagtcaacccgcaattcaagtctaaatcctcgaccggcccggccaccatattccgcaatcgatcacgctagtcctcgtccaatccgtggctggtcaacacccggtccccagcccggcgtgatccaagatcaacgtttccgactgcaagcaaaatgagaggtctaggaccggatggtctacgcaaagagacgtacccgtgcaagatctgtgggcaacgatatagccggctagaagtgagtcctgctctagctagtcactgagaatctcgactttgagccgaagctgaagtgacgtgctcgaaacagtacttacggcgacatgagcgcaagcgtgagtttcgagattctcagggatttctagatgttatccggctgatcaagctcggatgttcacctacctagataattcggagaaacctttcggctgtccagcatgcaccaagtcgtttgcgcggaggtgaaccgatgctgttcatgctctcttagccagcttgacggaatgctgacccgtcttcctctcgccctaaacagcgatgttctactgcgacacaagcgtcgatgtcaccccgacgaattccaagagtccgaggcgacggccgccgccaacgctctcctctcggcctcgaacagccgacggagttcaggctccaaagacggtcgaaggcaggggaaacgatcggcacagtctcccaactctggggacgaggaagatggggacgatgctcaaccgcacgcaaagaagcggaaagagtctggcgcgtccaagggggaggagaacgataatgtggatcctagcctacgggatggatacgtccggagtctacatgacatggcgacgagggccgaagaggaggggcactaccgaccggaagaagatccgtattacggccatcatcctatccaccacgatccgtacggtcaacatctcgccgcggggccgagcgggacgagttatcatcatcagcaatcgtcggacctagatctcggtgcaaacaccatttacggtcacttgcctcctttgatgggcgaccatcagggtatgcagcccatgcgggacatgtaccatacgggactcgatctaggagcggccgcttgggatcctgcctactcgaacggcaacgtctcgctcaatcagatgggcgaactcccgatgagtgatggacagcaacaggattacagcggagacgcccgaccggtcgacgcttctcatgcgaatggggatcagcacggaatcgaacacgccgcggcattgctctccatggcataccagatgcacaaggagcggaaaccttctcaagaggaaatctctccgacgagcgggagctcgagttcccataattccggattcatccagaatagcgccattgaccccgggttgcaaaccggatggccaccggcgcatcaaccggaacatcactatgtccgatcgcacaatgtgctcgccgctgggacgctatttgatgaagatcctaccaaccagggtcaagctggaggagggtcattcgacgcgtccatgtatctgcctagcaaccaggtcatgcggacgcaagacacggagagggacgccgatccgggattgatgagcatattgaatggaggcgtctggtcggcacctcagccgatgggatcggggacgatgacctatgccggtatcgaatcgtgggcaggtgtaagcagcttcaagcacctgtcccgaaacacagcaacgccgctaattctacgatatctatcccgtttgatagaaccctctaatgttccccaacaagctcggtgtgaacccgcggttcaactggtcgagctactttcctcagacggaaccgctggaatggtccgacgaggtcgccgagccagaaggctgggcgcatctaccggcggcggcgctctgtcagatgtcgccctactcggaaacgcctttgatcaggcttcagacgctcgaaaagcgtagacgattcggtcgagacctggaccccgccgatccattcttgtgagttgctcatagggatgccccgcccggatcgagcttcgactgatgcttgcgtcatgtgttagcatctcgtatgatcggttcaagagatgcttcgatattccgcactggaacatgccctcgatccagaccatgagtcgaatcgcgaaacagacggtctcgactctgatcatacacgtaccgattatccatatgccgaccttccgcatggcagaggtctcggcagcgctcagtttcgcgttatccatcgttggcagtcctcgtcattcggcgatcgcgggcgatcggtcgagaaaggtcttgagcagcgaacgactctcccaattgagggctttggaccagcagagttggatgcggggcgagggcatcatcgcccccgacgcctctgcgcctcaggtggagatgcttgaggatgcacccaccgatgaggagaagcggttcgaggacagcaagcctgtaagttggctcgtgcgagaaccgagcttgatgtcgaggagctgatttacttgtgtatactaggtcgtcgtcgaagacaagctcaaaatggtcaaagacgtaagttggtacggatgtcactcgaaagcaccatcagttgaagctgattgagtccactccccagcacttcaaatccaaagaagctcaaaaggatccggagcttttacacgggttcctgcaggtaagcaatttgttgcgagaagaatctggtcaagacactgacgagccttgtgatagatcatggtcctgttcgcggctccgctgctattcagccctatcgaaaatcagcgaaaggcgggttacaaggagctggccatgattgtcgactgtgccaaggaaaagacggacgcgttgatgcccgacatgcctcattcccgaatttacggaagcccacttacggacgccaactttctcggccctggatatagtaccgaaaaccgatggagagagtggatcaagcttgagacctgtcgtcgattggattggatgatttacatcttcgacacgcttagcatcatcgaggctggcaatgcgccgctcatcaagccaagcactctcgctggtttccctcttcctgtaccggacactgtctggcaagcgccgtcggccgacgcatggtcacttgcacttatgggctactgcccgactactctggacacggccatgaaggatcactttcaaacgaatcaaggtggattctctgctgccggcctggagtcgacatcacatctcaactcgctgttgctcaggaacgactttggaatgtttggtcgtttggtgatggtggtcaccctgttacggggactcgtggctctcggcaagggagatcccgaggcagccgacatgcttcacggttggggcgtaaacttgggatccgtggctaatggtaaaatgatggtagccatggtcaaagcatatggtcaagcgctgcaaaaggtaagctagagatgcatgcgtctatggaaactcgcttatgcggctgcttttcacatagtggcgacaagggtgggactttgacagtctttgcgctgcctctgtcctgacgccttcactttcgacggtccccgttccgcactacgaaacgtcatcgggccggcacggctctcttgggggaacgagcacgtccgcgtctagccaaagtgtagtaacgccaagagatgaccaggactttattgggagtcgggcaaagggcaagctgatgttctatgaaggcaagtttgcagtacagtcaaggtcgatagagatgtatgcgatctcttacattcactctatttctgggcgcaacagaagccctgccattctattggctaagtcaaacgatctattcaagcttggctagcgatgcgacgatcattaccgatcccgacatgcaacgcgggcaatttggtcgggaccgtctcgctgaacttgacatcaagacgatgctacaaagcgcacgtgtattcgtaagtttgtctcggtcgacgagaaacgcccaggctgagatgctcctgtttgtatatagacacgaatgggagaaggtgtacccaatactgtatagacggatatgaacccttcgcatcggatcgttgtagccctatcttacgtccataggttgtagagtacagtgcgcatagtctaaatccaatataatcttgtgcacattccatatctagtacatgcctgccattgacgtaccaccaccggcagtcgcattcttggggtcgtaaatcttgggccagttctccttgatggtgtgtagcagttctgctgccccgtccctcaggtctttaatgccctggagggccaggaagaaatcgtaacgatcggaggcggcgattgcaggctacatgtgcaaaaaatcaaggggatttgaacgttgagggacaggggcaaatatgttactcacgccgtgatctttcagattaggaaagcggttccacgtccttcccaattccatcctgtcgttgaagtgactgcgaggtatttcgtgtaatctctggcaagcgcgattagagctaccgatcttttccaggacgtgagcttgaacttcgacgccaaagttgttgccttcccgccaaaagtgtgctctgtcaattacgtagcgtcctgagctcgtggaagtgacggaatactgaccgtcttcaaccttaggtacctccaaagcaatccagcgcttgaggtcaagataaaggatcatgctagtctgggcctccctgataaggtgatgatgaacggtcctaagtaaggcgatctgcttatctatgccaaagggatctcacttttcaaggatccgcatgatatcgagacacacatcattgctagcaagtcctccgagccagcaaccagagttgtcaccatcatcgcgaacgagcgcgactccattattgtcctgctggacaactgcgtggtgggtgtcgccgacgatgggagtactgtcgttgcaatctctggatgatcccagactttgattgtcatggacaccttgtagggttacgttttcggcccgaaacatgcctctcccgaggtgcccaagccagagcggagatgactcgttgtcagacccagccaacagctgatcaagcttccgaatatggccgggcaacttgtcttgcagtacttcgcgagctcgaatcctcgcgatctgaagggtaccctggattcggacaaacaaccccgaaagccaaggtgggcacatgtgtgtaaatcttagcgaacgtcaaacttacctgtagggctctgttggtattgccgtcgtcgaagacgtctgccattgacagtgcgtccacaatgctaacagctgatggtttagcttgaaacgaaggcatattctagtccgatgtgagaaattctttattggctcaacagttctgaaggtagtgacatcctgcaacacttgaattatgggactgctgacccggttcttataatattcacattgtatccatgcacaaagggtcaactatactccctgtggacgagttcgcgcttcctttgtcagcagcatcttacaaactcccgacacaaaggaagcatcatttcttctccacatatcaaaggggatgatgcttaagttgccatagatatgcacgggagcgaaaagccatgactgtacctgtgcagctgtgaaacaagctgtccggtaaatccaaaatgcataaatcagttaatctatgcgttttcagactcggtcgttaggcgaatgccgtactcgcctcgacctcaacatctacctaagtagctctggtcctgtaagcaagtgacatgatcaattcgctcgccatttacaatccacctgattaattaccgacctcactgaaagaaacactgcggatatcgtgagagatgaagtgagtatcagatcgtgtgtccgcttgagctccgtgagctgatcgctccgtcatttgcagcgtgatccgcgagatcggtaggatcaacgagcgagagctggatcttggtggagatggaatctccgcgagctggcacgatgactataaaggcaagtccttctttgtgagttatgacatatgcgagtttgtaagctgatcgagtcaatttcagattcggcatacatctttgtgggtggtctgccttacaacctaaccgagggagatgtcattacgatcttttctcagtgagcttcatagccgtcatcgagggactcgcatgaaatcagctcatcggaaacgttccgtattacagattcggagagattgtcgacatcaacatgccaagggatagggaaacgcacaaggctaaaggtttctcattcctcatgtatgaggatcaacggtcgacggtcctcgcggtggacaacctgaacggagccaaggtcttgggccgaaccgtcagggtcgatcatgtcaggagttataagcaccctgacaagaccaacgccgagggagaacgtgtagaggctgaagaaccgacttataacgctatgccaccgctgataggcggagaaggtcagtctaggcctgtcgattcgcattgagcgaggaagggcttttctgacacccatattgagattacacagatgacaactcggacgattcatcggataccgacgctcataattcggccgacgacgaggacccgatggcagcgtacattcgagcgcagaaacgagaagaaaagaaggctcgaaaggaaaagaagggcaagggcaaggagaaggacgaaaagaagaagcggaaacacgagggagagaccaaagaggaacgggcggcgaggaaacgggagaagaaggagaagaaggaaggcaaacgaagtggatcggtactcaagctcgaggacggaggtcgagatcgctcgcagggaccgaggagcgtcaaacgggagcccgaagaccaaggttcttcctcgcgtcatcgagatgactattctcgtgaccgagagaggcgttatcgggagggttccccacctcgacgtcgatccccatcgataggccgacgaggatcgcctccaggcgatgctgtcaaggtcgaaccagagacggattggcgagcgggaagacaagagacattgggacgacacgacgggagagacctcgctcgggatcgtgacgtcgagagggaccgatcctatcgggaacgagatgctgaccggacgatgcggcagatggatcgttcgagggatgatcgggcgggtcaggacaggcggtacgaccgggatcgaaggccggatgagcgtgatcggggacagcagtataatggacgtccatctcgatgggactagaacgatctaatgtagctcatgcgcggtggctacatgtcaagatggatggcatcgctccctgtacggtttgggtctttgggatatcaagtcatgtcaaattgcttccgaaggtgttgaatctgcgttgttgacaaagtcaaagagagagagagaagagaacctttcttcctttcgatcgtctctttcttattgccttgcaccttcggcagtctactttgaatctctcttctgagtagttttggtctcatattttctcactgattcgagtctgttaaatccgaacatcattacttgcaagtcggtcatgcctcgacaagcccgaaagcacaacaatagcaagtacacgccgctcccacctcggccagtaaagggaaagacggacgagccagaagtctcggatcattcggtttcgttgtactggaacgctccaccctcgctaccgatcctgctcgaatggctcgatgatcagggcgtctggatttcggacaagctgcaggtgacggagatgcaagatggacagggatggggtgtgatcgggacgaaagtagggatccctctcgaagtaggtccgcggtgtcttttttcttaagcgagaccatgatcgaagggatacttattcgcatcctgaaacccatctggcagtctgccgaatccctagaaagtccatcttgtctacccagacgtccaatctgagctctatagtttcgagcaagacatggcgacagatccctgcgctcatccagctggcactgacgctgctgttcgagatgcgtaaaggtccaggctcgacatactatgggtatctgcagtctttaccaagacagccggtatctattgtggccttgtgggacgaggacgagttgttcgggcaggatggcaaaaaggcgctggagaaactcgctgggaccgagatgatgagggagacgagacgtctagccaaggaagaacgaagcaaggtagggcgtctggcgctcaacgtctactttatgctatcggctgaaatgtatcccgatgcactgcaggacgagatccgtacatactggaaggtgacccgggacgccttcccatcgaccccgtccaccgtgggaccgccgacttttctcgacgtcatgcacgcctactcgttggtgacttcgagggctttccaggtggacgcttatcacggcgctgccatggtgcctctggcagatattttcaatcacagggaggataatcacgtctgtttcgaggtgagcgtggcgagcgtccttttcgactcatccgacaagcgggtctagggtggaaatgtcgtactgaaacatgcaaaccatgcgacactcccttccttccttttccagtcggacgactttgtgtgcgagacttgcggctcgttaccagcttgcgagcacgacgagttggattctcgttccttaccttaccgactcgcgcacctccctgaagaggtgatcgcctcgtactcggacccagcacaggcgaccgtcgatctgaccgtgacgagtccgtttggaccgggtgaagaggtctttaacacgtacggcgatcatatcggttggagcaagatgttgaacgagtgggggttcatcgacgagacgggtgatccctttggacgagggataggatgggaattgaaagaggtcctcggtgacgaagatagggacgactttgagcaacggagaaagctgtggaagtcgctctgcaatcgagaggtcgcgcgggatgacgagcaaggggaggacgccttgatcttcgagcccgaccaggagcaaggacgatacagccccaaagactcgttattggtcaattccgagggacaagtctcggcgcctcttctctgggcatgtctggcgacgagtctgccagagggggagatggagggcaagaaccgggaagcgctcgtcagcctgggtctcgatgttcagacgcgactggaagccagggcggggagtcaaggtctggtcgtatgggacgaggatcccgtgagtagagcgtgctccgaggtcatcctagagcttgtacaagaacggctggctcggatgtggcatgcgaattggtcgattgacaagctgtgtgattacgccgatgtgagttcggcagtgacgacattatcgttttccccgggacagcttgctcatcgatctggctttgcgatccacgtaggcattaccgaccgaggctaggttacagaagatgggtctcaagttgttgatcgaggagagacgggtgctcgaggtcgttcaacagcgatggtcgttgtagcagcactgatcgataatccggcgtcatctgatgatgatgatgatgatgatgatgatatccgcggtacgactgatgaccccaccccgcctgtctcttcgctcgcgcgtgtgtccatgccatgacgtgtgaaactagtctgctagctgctagtgtgtggtgtagttacgtagttacgtagtgagagcgagcttcaatgatcggattgacgcttactcgtctccctctcgctcgatggaatgggctcgaacagcagcagcaaccaacatcaccgtcgatttgattgcaaagataatcaccacagatccacagagcagtggcaacatacaccgctaaatacaactacttcacctcacagtcaccctcacctgatcctacctcgtgctcatatatctagtctcgttccaccatcgagacaagcaacgagccagaccagcgcaactctagacaacgcgcggtttcttccccattcaacccctatcaccctttcatcctacaagtgccacatcgacagcccttacctttcaacatggccgacgcttcgatccctgaaccttccgctacccagcctgtagctcccaaccccaacgcagatgacaccgccactgccatcctccgaccgaagaagaggtgagttcgcacagaaagcctggtgaccgagtcgatcgtgcatatcgaggacaagaacgccgaatcctcgtcatccgacgagtcgacgacctttgcctctggatcgtccggtcaccttgctctgtaaacggatctggtaacaaaggctgacatgctcctttccggtatccagccctaaccgactgatcgtcgaggaatcgagcgctgatgacaactcggtggccacccttcaccccgccacgatggacattctcggtctcttccgtggagataccatcatcgtccggtgagcccatgtctgacgtctccatcacgtatcgagtgaatcgggccgggctgactcggcgtgggcgacctctgaatcgtattgatcagtggaaagaagagaaaggatacagtcctcatctgtctttcttccgacgaagtcgacgagggcaagatcgccttgaacaagggtgagtcacccgatcgcttacgatatctaccgaaagcgaccggactgacaggatgtctacttgccggtctgatcagtcgcccgaaacaacttgagggtcaagttgggagacttggccaacgttcacgcttgtaacgatatcaagtacggacagagggttcatatcctgcctttcgatgactcgatcgaaggtgagtctacatggtcgtctacttggagcgggggcgggatgttttgctgatacaggaatgggaccgatctgatgatgacagggttgactggaaacctgttcgaggtctacctcaagccttacttcctcgagtgagtcttcccgctcgctaccagccaaccgtgatcgatctagcgtgttctgatacaccacccttctccaccttgctagagcttaccgacccgtcaggaagggagacaccttcctcgtccgaggtggtatgcgtaccgtcgagttcaaggtcgtcgagaccgaccctgccgagtactgtatcgtagctcaggacaccgtgagtcggctctccgcctccggaaagtaatgcctcactggccggattgtgctgatgacgttacgggatcgtgtagaccatcttctgcgagggtgaccctgtgaagagagaggacgaagagtccaacttggcggacgtcgggtatgacgacattggtggatgcaggaagcagatggctcaggtgagcagtacctcctgttctcgacggctttggcaatccgactcaagccatatttgcaccgacagatccgagagttggtcgagctccctctgcgtcaccctcaactcttcaaggccatcggtatcaagcctcctcgaggtatcctcatgttcggacctcccggaaccggaaagaccttgatggcgcgagccgtcgccaacgagactggagcctttttcttcctgatcaacggtcccgagatcatgtccaagatggccggagagtcggagagcaacttgcgaaaggcgttcgaagaggccgagaaaaacagcccggccattatctttatcgacgagatcgattcgatcgctcccaagcgtgaaaaggtgtgttcttatcgctcggcaccacgagggacgtcggatcgaacgagtctgacgctgatttgtccctcgtgatcgcagaccaacggagaagtcgagaggcgtgtcgtctcccagcttttgaccttgatggacggattgaaggcccgatcgaacgttgtcgtcatggctgctaccaacagggtgagtcgggcagatcgatcatgctctaaagcacacaggctgatcttctttttatcataccgcagcccaactcgattgaccccgctctgcgacgattcgggcgattcgaccgtgaagtcgacattggtattcccgaccctaccggccgtctcgagatcttgcgtatccacaccaagaacatgaagctcggtgacgatgtcgacctcgagcagatcgctgccgacactcacggatacgtcggtgccgatatggccgctctctgttccgaggccgccatgcagcagattcgagagaagatggacttgattgatttggacgagtgagccggtggcgtatgcaagcgtatagacgcagccgagactgaccttgccactctcgatcgcagagacactatcgatgccgaggtcttggacgcccttggtgttaccatggacaacttcaggttcgctctcggaacttccaacccctccgctctcagggagaccgtcgtcgaggttcccaacgtctcttgggacgacattggtggactcgacaaggtcaagcaagagttgcaagagaccgtccagtaccccgtcgagcaccccgaaaagttcctcaagtacggaatgtcgccctcgcgaggtgtcctgttctacggtcctcctggtaccggaaagacgctcttggccaaggccgtcgctaccgagtgtcaagccaactttatctccatcaagggtcccgaattgctctcgatgtggttcggttccagtgaagagaacgtccgagagatcttcgacaagggtaagtcgggacaatacgagttcacgtgccttcatcctgacgctgttgttcggccacagctcgtgctgctgctccttgtgtgttgttcttcgtacgtctcactctcagcggctcatgctgcaaacaacttacttactagatgacttcccaatctaggatgagctcgactcgataggaggcaagcgtggagtcagctcgggtgacgccggtggtgccggagaccgtgtattgtaagcgtctaagcgatgagacaatcgcccgaccacggtggctgaacttcatcatgcacaggaaccagctgttgaccgagatggacggtgttggtaccaacaagaacgtctttgtcatcggtgagtcacctcgcattcggtcgtgctagcggtccatcgtactgactggaaccctcttgtcgcatacgtaggtgccaccaacaggcctgacaacctcgaccccgctttgatgcgacccggacgattggaccaagtaagtctgcctaagcccaagcacaatactgcagccaatctaacgatttcgttcgtttgcagttgatcatgatccctcttcccgacgagcccagtcgtctctccatcttcaaggcggctctccgaaagtcgcctgtcgctcccgatgtcgaccttggttacatcgccaaggccactcctggattctctggtgccgattgtgtcggtattgtgcagagggcttccaagttggctattcgtcaatccatcgagtttgacatgaggcgagaccgtgagcgtcgtgccagggccgaggccgctggcgagggtgccatggatgaggaggagaccgccgaagaggtcgacgaggtgcctcatatcaccagggcccacttcgaggaggcctttggctacgcccgaagatccgtctcggacgccgagctcagggtgagttcggtactcgttcaatccgacccttatgcacgtcactgattcctgctttccctcgccatagcgatacgagcaattcgccgcctccatgtccgcttcgaggggtgctcagggttccaatttcaaggtttgttcgccttctgtgacttggtgcactcgtgtttgccgttctgatctaatcgtaaccatgatgacgacagttccccgacgccgagaccgctggcgagactggtcaagccggtgctttcggcaacgaggccgacgacgacgatctctacgcctagacaatgtgtgaataaaagctcggatctacttacgaaagatgggcgcgttcgatagtcgcgaagaccctttgtcaattggaatagcaatttaatcagcagtcatgatcatgtatatgcgtcgaattcaggtcatcttttgtgacggtgttcaatggacagggcgagtgttcgtagcgaaagtgcatctcggcccaatgagtatagagcaagattcggtgagagaatagacattacgacattgaaacggtcgctttgttagttctgtcggcttgaagatgtgacttgaccttcgtctgtaagctgggtgcaacgaggttgggggaaatttcgagtaaaaagcttcgatcttgctcagatggttgcgataaagagtaacaaagcccgtctacttctcgtacaatatggatttacaacttgaggattccaggcatatatacacacaccaattcttccggagtccggctagtctgacccagcccaggactcggcggcactggcttcatcgtcatcactgatctcgacgatccgacgcttcgaaccagccttggcagccactttgcgtttgctagccgtcttgtcttcgacttcgccgtcactctcttccacttcgatggcatcgtccagtccattgctatcgatagcactccagtttccgacgggtttggcaccagtcctctcgctcatgatcttctcgtcaactgcattggctgtcagcaaccgccatatatgacagcgcttgtcctgaccatatcgacggattcgtccgatggcttgcgtctcggtcgcgatgaaacgatcgttactggcctcggggtaatgcaccgggtgcacaaagatggcatgattggccaatgtcaagttggctcccgaagcacttgctgcggcgacgttcaggatgagcacgcgttccgcatcgggatcatcgacgtccagtttctggaatcgatccaactcgttggcttgcttcgatgcagaaccctcgatgacgatagtaccgattcgagctttcttgagcgctagcctgatcttgttcaacagatcgtcaaattgcacgaacacgagaatgcggtccgtcgagttttgcgctgcaatatgcttgataatggcgaccaattgaagcagtttggcgccgaagcgaccgctcttctcctcccgaccaagcgtcttggtaggaatcacctgatgggtctcgagattgatcctgcaaccctcgtgcggacattcgaatccatgggtggccaagggtgtcaagcaggctaagcagccagtgtggccgcacgcagagaggatgcaaggctcgctgcccgagttgccttcgcacttgatgcaaggcttgatcgctgcatctccgtttctctggacgtctctcacagcagtaaaataccgcagggaacgggttcgtccaaccagttcgttggctagtcttcgtagaacatggctcttctctcgcaactgccacttcatctcgtcctccttcagcttggtattcatcttcgtactcccatcctcatcctcacggggcttgcggctcttgataaccgcttcatgcttcgccttgtcgaccttgatatccccagtgatccattcgcagccttcttccttcaggattttccggtggagtagggttgcttcttcgtctccattaccagcctcaccaaacgtcgtcttgagatactccgcaaagtgcatcgtcttccgttcttggtcaccagttttggggtcccgataacccttcttaatatcacgaatgtacaagtagagttcgagcgcttcggcgatcgtgtaatgcagatcctcttcacaaagtttgcgttgtttggtccgggtcttgacaatccgctcgcaggcctcgaatgcatcatgagcacttccctcggactccatgtcgaagtgcgcacatcgtttgatcaaggcctctctcggatccgccgagttcccaagcgcatcggacagccggatctgtcgatcggcacgggcgccctttgccgatttcatgattttcttcgtcatgccttggagcgagtgaatgtgatgatcgagctccaagtagatggcatgctcggcagctggcagggtaatcgagaccaccctctcctcggagtggatctcgccgatctcggcaacattttgcctcacaaaagtatcgaggaatcgttgcgccacgccgtaacgagccgcgtgccaggacgcagtatgcgtttctcggaaggaatggaaggcttctgcagcagtctgacctttctgacgacgctttgtcgtctcggcagttccctctgtgtcgtcgtcaactccaagatgaacgtgaaggaaatctgcaattcccttgaccgccgtaaagtcagacacgggaggcgttccagaaaggacccatgtactgatgctctcgagcttggtgacagccgagaggcaacgttggtccacgtaggtgaattcgtcgatgatgacacggttgaacctgaacatatgcaagggaggcgagcgcatcttgcggtaattgtcgcgtacgtccttggtattgagattccaagggtcgtgagcttcacgctcgtctttcttctccaccttggcctttttggccttgggcgcggggatttctccttcttgcatcgcgaggtacgctgcaccggtcagtcgttttttgccaaaggtcatgataaaggcgtccttggtgtctttggcttctttcctttctgcagcaacttctgctaaagattgcttgatgttcttggagacttgcttggcgccatcttcctcctgcagcaactcgacctgagagtcaaggccttccagtatctgatcgagacgcgacacgaagtgacgtgtggccaactctccataaggaagacttccggaagctgcaaagcccgccaaattcgaccagtagagctgactcttgaagatcgtcaaggccacgatcacaatgtctgctttctcgatgtctcgcacgctgacagagttgatcgaggtgagatccaaaagcttgacaacgcggtactccttacgacgcaagaatttgtgaatttctccctcccattgcttggtcaaatgagctggaacgacgatcaacgtggcctttgtagcgattctgcccggtcgtgggacatctggtagagcgtgttcctcgacgtgattcgacgtatcgatcaggcctaaagagatcgccgtcttgccgtatccgacctgatcagccagcactccgcctcgaaccatcacttttcgggatgctctgccttcagctcgccaacctagaggtccaagcgtagcttctgcgacctcttcctcaatgaacgagtgatctttctcggcttcttgttggagcatccaggtcagtgagcgcagctgctccggccgaagtttggggtctttgggttccgtcccgaaatttggtggctgagcggcctcgacatcatgtctgttcgacttcagatcgagcttaggcggccggaagaaggcagtctcgacggcttgatagtccgtttgtagcctccaagccagctcgggtgactgaattcgaccaaacgagggcaaacgagatagggctcggtgcaacagagtggcaatattgagaccgatctggatcgtaccaacggacccatcgagtcgtatttgggcgaccatcggcgcaggtcttcgcttgagcgcctataattcgctcatcgaatcagcatattgtggagagccaattcttacggcaaggagcgaaactcactctttcatactcgccagcctgtacgacgtcctccactgggacaagcctgttcgcgcgcatcatccagctcaattctggtggcgatggggcgcagcgtgcgcagcaggtcttctcgtcatcgtgatgtaagtctccaagcggtaccgaagcccattgcttcagagtatccagcgcaggtaatctttcggtgatccaagcaagtgcgtcaaaggcctgcttgcccttgtgctgtagttcgatttccccccagaggccttgaacgctggaccagagttgttcggctgacgcgtgtggaagtggtactttacaaaccaagagagcattcgcatgcacgcaagcgttgtcgccaacgtccagtgtaagcgatcgctctgcgatcgcacaagtcgctttctgtccttcagctacgctgtcatcgatcggcgccatagaagcggaatcggtaggagcccaacttccgtgcacttcggccttgaccgtcatagaggacatcggatcggtgggtgtaggcctccacttagaatcgactttggcgatggccactcgctcttgatcatagtcgagcctctcgtgatccaaagcaaagacgaatggatcgtctccagagaaaccaactcggaccgggtcaaggaagaacgagacgttgggctctccttgcttgatatgcaagcattccatggcggtcccacaactggaatgcaaatcatacgttccactgatgtcgacatctagtttggggtgatcctcgtcctgatagctgatctgtaactgcgaccattgcttcttcccctgccaatctaccttgtcaatagaattccctttcgcgtcctggatgggcaattgctgaagcccgatcctggcttcccaagccggaactaattcgccgcgtcccttgatttgcagcttgagcttttcgacagacggcagctggatggaccatttcccatccagcagattcttggctgtcggctcaacaatcaacctggcaacgggatgagcaacgagcttgcgtcgacgggcattcgcattgtcggttgtaggggctttgacaaacaaaagccagaccgccttgtccttgtttaatgtgagtctaaggctagcgcaaggtgcgtcatagatcgcattccattgatgcttgcgatcgagcgatttgaagtggaactcagtatccgacaagcttttgacgaccagcttggaccagagagcccaatcgttcgcgtcgattgacgcttgcgaggactctgtggtagcgtcgaggttctgctgcgtaaagccatccacttcgatcctcataggcagaacgctcttaaggcgacgagcaaaagtcatcgcgtcgattctttccgcagcgtgaggatgaggtccatactcgtgcaagggacgattgctacatccttcacatctggtatgttgacaagcctggcagagaagagttggttccttggatgtccctgttggaccctcgcagatacagtatctcgagcttttgaccgcgtctgagagtacttcttggaccgagatgtccgaaagcttagccaggtccaaggtttgggttgtaagttggtcttgaccaatgatcctgtctggcagctcgtcgccgactgcagcgatggcggcgtccagcacttcggtctcgtggtcaacatccatgctgtcttcaatgccgtcaaggtactttgtggcgagaatgatagcagcaaccatgcacgttccaacgacggtagacgacatggcatttcctgccagatcggcaagctggtcttcggtttctcgggtgagcaagagctcgtcggctggaatcccttgcaaggcaagcgcttcgattccgatgagaggcccgcctcgattggtcacataggggatcatggtaggagtcatgcaaggcacgatacccggtcgctttgcagaaccgatctctcgatcgctgtcaagaggatcttacgggttagaccacaagtatgagtaaatgagacgcacagcacgtacacattctgggaaagattccacacaagcgtccggaaggctgcatcgaagccactcctggcagctctcaaatgactgacatcggtcaaatcctggactcgctccgtttgtgcgttggcccagtcgttccagtatccttctgggaagttgcaaatggctccatctctccaatcagtccaaggtcgcttggttcctagcccttcttcaaatcggcatttctcgtgccgagaagcgcatcgtccccaatcggtcggtgcacgtgcttttccgagccccttcgctgcggcgagttccagtcgaccttgatgcagacgagggtcgttaggcgggagcaggaaggcctccaaaggtgacgaggcgggcctctgcatcgaagtcaccatgtcgacccagaggtcgggcaagtgattcacgaccgacctgctgccaaccttttttggccattcgggttgacggaatgcaacgaggtatccacgagtacgggtgtgcggaatataaaagtctttagtgtcgaatctggcagagagacgtttacccgatcaaccatattctctgcggtccggctaatggctcgtgcgattgcttacctttgcgggatggcagaatacccaatctcttcgaatttttctgctacctgtccccaaggagcggaacagacgttctcgaggactacaatagctggtcgatgattggacacccagttgtacatctaggtgttaccgtaacattggcgcgctgcatggatgccgtgtagaaggcgcaacggcttactccacggaatgtgtttccactctctcccttctgctctagccctttcttctggttgttgaggttggagtaatcgacgcaactggttccggcgacgagcaggtcgacattgccgggcaccttgaccgaagctccgtaagccgtcgtagcgtattcgtttcccaactccgttacgtctcggaacaagatggctgaagaatgcagaagactgctcgtcagttgttgtgtggtctcacagacttgaacacgacccctcggactcacgcggggcaaagtttcgctcgatataagcctgcttgtacggttcaagctcgcaactgaagacatgttccacgtcgaacgggaccccataggcgactttcatctccctcgaaatcaatcccagagctagcaaaggcgactcggtaccgctatcattcgcgaattgttagccattacgcttcctcttgcgaccgtcacctcgtctctgcttacctgcacatggtggccactcgcaatttcctgcctcccatcttcttgacagcctgagcgaggtaatgtcccttgggcttcacgtacgcatcgactccagctagattatcatcgatcaagtccacctcggcgcgtttcccattagccgtggcttttccgttcatcgcagtcttttgagtcttgatgaacccgaacaaggtcgtctgcttcttctctcccgcagactttgaatttgcggtttcgtcctcgtcttcatccgtgacaatggcttctaccctcgcaccggacgaactggacgttttcgaaggcgaagtcgagctggacgcatccggattgggatcgcgggtgatcatgtcccggaacatcgaggtgaggtcggacatgggtggcaagtttcctgcgtcagccgcagcggcagaagccttcttcttggcggcctgggtgagacctcccgtcgatactgtgagcgcggaaatgtcagcccgcatgttcctgtcttgtttgcaggatcttatggaccggtgcttaccactcttcttggctacgggtttcctcttccagaccgtctttttctcactgaccacactcaccgcatcagattcatcgtcctcctcgatctcgctgaccgccctggaccgggactttggcgcgacagccagggccgatttcttcttgggcttgtcttgctcgctctcctcgtccacatcgacaaaggcttcctcctgatcctcatcctctggctcctcaaagtcgtcatcctcgtgatcttcatgctcggattcgatcttgaagtcggaatcagagtcggacacgaccttgcgcttgggcttgggctttggctgagatttgggtgcaggtctcgaccgggtcggcgtcgacgccctaggcgctggtcgacctccaagttgtggtttgggtgaaggttctggtttggccgaagctggtgtacgggtcctgagcgacctggctctaggcgcatcggggatctcggtaacttcttcctcgtcgtcgacttcttcggcgggagagctctccttcaggacccggcgaagcggtgctggacgcttggagaagaaggaggagatgtcggctgagcgtttcgtcgtgtcccggaccggccgggcgggtttggatttggtttgagcgactgtggcggatgtatggcgggttggtaccgacgagggaatctcgacgctgagggtgtacggtcgattcccaatcggacccaggatttcgggttcgccctcgctctcactgagaacagcctgtcgtgctacttctatttcaacgtcttctcccatgggcttgtcttcgctgaccgcaggaacctttccctgaacggaacgacgaaccgcggaggaggccgggacggccggctcctgttcgctttcatccgaatcgatgatgatgaccgtatcgttcttcttctcgactttctcaacggcatttcttgtcgtcctcacactcctcctcgtcgactgtacgacctcgacctcggactcgtcttgctcttcgcgatcatccccctcggattcggacgaagagataacccatcgtttcttcgtcagggccgtttgcgccgctcggcgggagcggcgggcgggtgagatcgacatcacgacctgacgatccttgaagactaggtaagaagggggcagccagtcagacaagagaagagttgcattgcaagagatcagaggtcatccgaaaatgattgtatgcattttacgaggtcgacggaatgatcaagcgaggcagtgagactagcaaacgacgcgttcgtaggagcgcgttgacgcgtctttatcgcgttcagcccggaagcggaagcagatgtactagtataattggagagagagatggagagagatgtctctacatgctacatgacatcgaatttcgaacagacaagtgtcagtggcggtggtgcgatgattccccaaggcggcacgggatggcctcgaggtcggtactcagcgatggatcttggctcatttggccggacgatacgggccttcataggagtaagagctctactgacgtcggagtgatccccgagggattcttgttccaacatccgcggttcacatcgctttgatttcgcggttgagccgccgtctcgttgcatgcatgacgaagtcgagagcacatgtcagttgcaaccgcaccaacatcagtgggtgttgacagctagatcgttccgttttctaaatgttttggtctatcgagcatcatcgttcaaccttccacatccagtaacaggtgttatggcgggtccaccagtcgagcccaagctcttgggcgagctcgctgtggtcatcatcaaggcggtgagcattcacgtctcaatatcacaatgcagtgattccgttagacaggagctcatctaacactgccacctcgcctcggcatctccggatcgcagaaaaacttgccagatcggagcaagattgggaaacataacccttatgtggtcgtccagtatcgtcaagagaagcggaagtccaaggtcgttaaaaagtaaacaaacctcgctctttcctgcgtaactgcacgtttcaactcgttgcattccgggctgatgaccacgatccttcttgctgtcttgcgttaaacttgatacgactggttaggggaggccaacatccggagtttgacgacgaggtccgcttcaagatctacgaagagaccgaggatatccttaaccgaccatccaaatcctccgacacaccgtctgtagtgaccgatgcttcttccagctcgaccggcgcagcagcgaggttacccctgaacaaatccatccaggtgcaagtatgggcggacgactccaaggatcccaaaattgtaggagaatgttcggtggacttgtcagaggtatttagaacgtgtgaacaggatggtgagtccggctcggggtcgcctgcgaaacatccggcactagaggctgacagggccggtccgttcgtagattcatacgagctgcagtacaagaaccgatatgcgggtgaaatctcgctcgaattgacgtactttatcaacgtgagtaaatggagagagatcgaagcccgggcgtgcaattcgaggctgaacatgactcgccaactttcttcacaggacgctccaccgatcccgaaaaaggtagctaaacccgtcatccctcccaagccgacccatagccatagtatcacctcgatctcgaccatcgcgacattcgatggcccagccggattcccactcaaaggtaccggaagcgggaggaggccggtgcagccaacgggacatgcgtatcacgctagcatagatgatcgacggtatttacagcactatcaggcagacccgatgaaccctgggatggggatggatgaatggggcgcgagagcggagccggcgagccacaggcaatcctttagcgggagaccgacatcggtcgcaccgggatacgatcctcacgggtatcaagcatctatggacagcctcggagggtccatgtcgagcatgtccatcaactcgcatgcgtcgggtgtacctcaagcactacccccacactatcattcgatgggagatcagtcgactatacagctaccaccgccgccaggacagccacaggctcattcgcacggacatcggtattccatgtcgggagcgattcctcagagttcgagctggaatggcaacccggcgattacgggaggcaactaccaaccggcgccctccagctcgtacggaacactgccgccactgccacctccaccctcgatgcagatcccaccgcgattgtcaacgcctcaggcatactcgaatcagatccctccgtctagctcatttccacagctgtaccagtcggattcgcaagctcctgccgcgagttatcaaccgggatacgcaacgcagcctcctcctcctcctcctcctccgccaccacctcctccatcactgccgcaaccctctcggacaccggttccagcggattattcgagcaatacgattcctcagccgtggcacgctcaatcagctccgccccagatgccgccaccatcatcatcaaatacgtatcagagaccggcgtccacgaatcctggtacctacatgccctctcccctgatcgacaatcgtccgccgccgagaccttcgtcacagccgcaagtccagccgactgcttatccgccagcagcatcggcgtatgggcaaccgccgcctcctccaccgggtagtctggcaggtcactatcctttgccgacgagttcgttccattattcatcaacgacgcctgctcctgggtcgtacggtgacgctcagggacgacccctaccgacaccaacaccggctccaggtggataccaggattcagtatatggtcaacagcagccgcctcaaggagactggcgggatgcatcctacagtacatctgatacgtcgggatatcaagcctccagtcagggctatgcttatcagcaagccactctaaataactcctatacgcatcctccaccaccattaccgttgccgccgtcatcagtacctccggttaatgcgtatatgtatgaacctcaacaaggtcaaaaccagtgggatcaaggactacaccaaggataccagcctcaatcgtcctactcggcgccgatacagcatgggctcagcgcgcctcccgctcctccacctcgcccgcattcgccgccgaacgccctgaccgatggctttgcgtctaggaatacgccacaagcaagaggtacaggaaggtctttcttgtcaaatctgggtgtcgacgagcagcaacagccgccaccaggaggaggctatggattacctcctcggctgccggacagtctcacaggtggtggtcagcatggaggttaagaatgttgaccttgttagtggtcgatcgatccaagacactggttgtatggtagactccgtatgagatgacatgcatgttgaaagacgtcctcgcgtgatcacgtgacgcgcgtttcctttaatcagatcctaccaaaatgttgaatcgacgtttaggttgcgccgtcgtcagctcgagaattgtcatgggatacatgccatccagacttagcgagctttgattcagctaaactacacatcgcatctgctcgaccaaatttaccgttccgtccgcataagccctccttgaattacatagagaatttgacaggtaaagatggcaggcgactctttcttcgtctcggacaaaaaacggaagcgacctaccaacaaaggtctgaatcaaaagcaaagccgaccttcctcgtcagcagcgcccaagcgcaaaccccgggacgaagaactttcttctggttcagaagatgataggggtgatctcgatgctctcgactttactagggatgatgtcggtgtggacgccacgcggtacgactctggtgaagaagaggagttgaaccgaaacgagacggctggtgaaaagcgaatcaggttggccaagggttacctcaacaaagttagggacgaagtagcgaaccgagtggatgatgggactttcgatgccgccgagatcgatagagaattgatcgccgccaggttgaaacaggacgtggtaagtttcgtagaaccgcttgtcaattgcttgggaccaaccgagtctaacatgcatggttccactctcaggacgaacaatctggtgcaatccatacattcttgcaaccacgactgtcagctatcgagtcccccgccactacgctcaagagacatttcctccctgccctccacaaccacgccgtcacagcctcccacgcatcttccactcacctatacatcgcccacaagagtggttctgtcgtacgatacgatctccgcactatgcgtctctctggaaacgtctttggtcagtcggcacacggacaggacggaaagggcaaggaaaagcagccggccggtcagggacacaagggcacaatctactgcttggcggcttccgaggacggcaaatatgtggtgacgggcggaaaggacaagctggtcggagtctgggaggttcagccgggatcgagcagcgctgtcccgaggcgggctagcgtcagtgcaaagaagcgaaagacgaagagaaaggcaagcgaaggaggcgtgaaatgggtacgagggttgacaggacacaaggacgctgtgacggtgaggatatgaaccggacttgatcgggcgaagaaaaagaatctgactgatataattttccctcgtcaccagtcgatcgcgatacctgcgctttccaacccctccatgcacttcctctccacctcgctttctcgactcctctgcttgcagtcactgtcaaccctctccacgattgataccttctttggtcatcaagattccatcgcatcggtatccgcaataaaacccaccatggcggtaacgagcggagggcgggatcgaacggcacgatggtggaaggtcgaggaagagatccagctcgtgttccgaggtggcggcaagacgatcgaccgcagggaggcgaacggcgatgtcggggcggagccggcagaggacgacaaggaaaagcccaaacccaaaagcaagggtaaagacgcaaagaaggaatttcaggagggaagcatggatgcggtgtgcatcttggacgactcgcacttcttgtccggtggtgacagcgggtaagtcgtcgggacacgagctgacatctgtcagaagcgtcggctaatgctagctcggttaaccagttccatctgtctctggcacaccggcaaaaagaagcccatcttcaccgctgggctggctcatgggctcacagagaccgtgtcggaaagtgaagggttgatgatcaggcccagactgatcactagtctagctgctcttcgaggaacggatctgttcgcttctggtgggtcttacagcgagccagtccggggttgagaccgtgcgtgaaggctgaccaattcccaccttccattcttgccaggttcttcgtccggagacatcaagatctggaccgtcgcccccaacctgaaatccttctccctggccttcgatgtgcccgcaagaggattcgtcaatagtctccagcttatctccgtaccgcctcgaaatgtccagccggacaaatggatttcaaacaaggcaaggaaggagcaagtcgaccgaaagaagatcgagaagaaggaacgaagacggatcaagcgtcatcctacagaagcaaaggtcaacggagatgatgctgatctgacggatggggacgcagcggttgacggagcacaggaggacgactcggagaaggagcaaagtgacgaggacatggatgcagatgagccgatgacggcatctgaaaagaaggcaaagattgtcgctgcgaaggcggacccggagattctcttgttggcatcgttgtcccgagaacctcgactcggccgctgggaggtactgaaggacaggaatatccgcaatgggaccttggtcgtccatttgggaaagcaggcattgtagcatgacatgcggcaattagaggagatgacacgaacataacgatacattcaagtgtacacaacgttgaagacaagtgggtcatactagaaatcgtacaccccttcgtcgtcgcaatccatcgcgtgcgcctttagtctaccagagaattccagaccgtcattgcgtacgttgactggcgaatgagcggtggtctcttctgaaaagtgcgcgatcgacgtcaagctgctgtgtcggggatgattgcccagggggacaggcggggagccgagcaggagcgaagatgtatcggtgtcgcggaaagagcggatgagtgggctgccggttgcgctgttggagaatgaccacacatcctcggacaattgagatccagtgctgatactcgatccttgcgatatcgcttcgtcggagagcaagtcttggtcatgacagatgttttccgacaaagtgtcgctgagcatgtcttcgcccgcgtccggcaactcctcttcgacaatatcgagcgagggattgagagaagagtcaacaatgtcttccatgggatcgtcttcttgagttggacctttgggttgagatagggtcctgagcctgatagccgccacttcaaatgcctctaagctgtgagcgatggcggagagcgggtcgatatcctcttcgataagaccatcttctattcgtggggagggaggtgcaggaagaccctggttgagttcggactctgatggcatgtccgggacttcgcactgatcaagcgaggcacgtgaaaagtcagctgtagtatgggatagtaagtacggctctagccgagtgttcaccttgagctttgatttgctgcactggttcacgcatagcgccatcatgccttcgcatagcgacctctggaagcgttcgccctcatcctcctcttctgtattgcgctccgctacatcttggacagcatccgcaagctcatcctcgtcaggtgtttctccgggccgtgttatcagtcgattcatgagctcattgttttccatcatgatcttttccaatgtctatgagacaatgatggcttaagtgtctcgtcatctgcccgactcatctcggcagatgcccgggactgacttggaagatcttcccattctttttcctgaacgatttgttcttgctcatttggatcatcgccttcatgctcgttacgactttggtgatcccggctgcttccctacgataatactgtgcacgagacgatcaggattcgaagcatgatcatgaattggagatcgactcgcagctttcacgccaccgttgaacatcaatggaaagcccctacattaggcaataccgatcagcaataccgtgaatctgatattactccgtcactcactgcccaagcccaatattcacgaagcgttcgcaaaagctgtcgagcgttggcacgaggcactccggtaatcgatacgatcctaattcctgtaagatactctcctcttcggcatctccaaaacctgagtcgcgcaaattcagtaacgtgacgatccagtcattcttgagcaccactcaccgtcttcagcaaatggatcctctacagctccatccgacttggaagagcgttttgggtttagtttgaatgtcaggcggatagtgatcatgtcgagatgcccagtgatgcgatgtttcggaattacactatccggtaaagggttactactgggtcgaagaacgactgccattcgagagggaaattagcgaaactgggaaggcgagatgaggaaccccatgtaatggtacatttcggttcgcggcggaagtttgcttcgtcaaattgtactgaatctaactctagccggttgaggttctacgagacgatatgttaaaatcagatagggtggacgcaacgtacatctaacgcttaccgcctgaaggatttgtattatgcgcttgtgagccgctatgccgttcgcttgctgatctccgacgaagacttcgacacggccatcgacctttctctgctcgtttggcaagatcaggatttgcttgagcagtgctccgcctgcggtggaagggacgtcgatcggtgttgtaatatgccattcaacctttgcagcaagtaggatatagtcatcggcgaatttgtgagtcttgatcaagtgatgcgttcgcagggttgctacagcctctagagattcagattcgtctgccatggtggctggtaccgattgacaaagtaaccttgatgaagacctcgatgaaggtgcagactaccacaagtgatcggaaacacctttggctgatatcaccagtcgtccactggctaaggagctttaaatggttgtcctttatgactggcgagtagtctggatgcctgcaacgtctgttggtcgaaattgatgaaccgggaaccggcgatcgcgcgtgaaagtgaaacatcagggtcggggcgttacgtcattatctagcgtaattacaggaagtcggtcgttgctatctagtcatcatcgtcttcatcttcgtcctcatcgccctcggagtccatctgtttgctgtcgtccttggcgaccctcctttctttgctttccatcctccttctgaattgccccagtttcccttcctccttatgccctcgcataaagtccaccctgcataggccacttgcgctgcccgaagccagcatccctgccctccctattccgttgccattgttccaggcgaggccggtgatgttgatctccgctggccagaccggggatgctttcttgaatccctctttatacttgggcccggagggatctgctagtctgcgggtcaagctcgagacctacaacaggacgcgcgaatctgagccacgaaaaagcactcaagaatgctgttctcgcttacatcgggcagcttccggtccaacatccggtattcgcccgtgttctggttgaaatcgagctggtagagctcgccaacaacgatttgctaagcacatacagctgtcagtgaagatagatcgagcggaagcagtactctggcgctgacctttttcttgtaatgtaaagccgtctggaccgaattggtccaaccgactaccccgtcagcgcctccggtagcaagcataccgtggaaatcagatgcaccgaagcactagtatacaaggcgtcagcgaatgtgatggcttgaagacggacttgaacgaaaagagacaactcaccaaaatcggaccttcatgcccatgggtcctcgaggtggcgaattgcgtgaacctccggaatttgacaaggagcccgtagtactcgccgtcaacccaaagaatgctctccatgtacccactccaatcaagggccccatgaactagagaaacagaacgtcagatgggagaatggccgagataggtgaatgtccctgacttacagcgcggctgcccctccagatcgcacataaaggtaccgtccctcatgtccaccagggcgagagtaccatcccagctcgcgctcaagatgtaaggcggagcgatgtccagccgagttcgatcctgggcatctgcagccggcattctagcccatcggactgtcttgacagcggatgcgtgggtcggtatttgattggtaggcagcactgaaaaaccggaatattttagttcacggtctgcagatgccagcaggttgtaatacgtacggatcgtttcctttccggtcaatatttcaacaaggttgtcccagacgcacacagaacctgagagaaaaggttcgaaacagtgaatacggctcgtgcactaacacgatcgagaccgaactcaccgctgctcataccaaccgccagcatccctgccgaaccccagtccaaactagtgcacgcgccgtcttcgatcctcaagatgagcagaggttccacatgcactgtatgccagcgtgccttctgtcaggaccttcatgatcggcgtcccaattactaaagcagaggctcaccaaaggttcgttccgacgacccgtgtctcggatcgggcacagcaaacagtcgaacagacccgtccgtcatgaccgccgagataatcccgatcttggatactctatcatcatcgcgttcaacctggtccacgagattaatccctaactcctcgatatcgtatcgatctactcactcggtcgcagcaccctataggcatccacttgaaatcgatgatcggtcctccttcgaaacacaacaccatcgaacacctcatctcggcgtcgtctgccgggtcatagaattccgcggaaataccggtctcgttgaggccattgccgggcgagaccgtccagatttgcaagcttcctttggcatcgggtagtgaagcgccggtacgattcggctgagtagctggatccaatgtcgagacggccaggtatagctcgaaatttcgttctaccgattcaagccgagacggtattgaggtcatcatgtcccgtcgcgtggcaggaatctcctagctctcactcactgctcgactcgatctcggacattggacaccactctatcccagaaacaaaccctcccgcatcgaacagattggcctgcttctgacccagcttcctcgccgtaaacatctccgtctctgtcttttcttgtacgacgccggcttccttgtcatctatacccaagagtaaagagagcttgtaacctgtgcgctcaatgagatacggtctagcttgcctgtcgcacggcccaaaacgcggttgagcagtcaggaagcctggacggtcaagagatatcggcttactcggcgtccaagtgtcgaatgtcctctttcctgactctgcccacatcttcaagtcctatgcctacttgaccctgaggtttccattgagcgttgccctcgccgtcatatgaccagcaatccgaccaccatccctctccgctccacatgtcccaggggatctcatgtggtaccgcatacagggtttccaaaagggagaagtacttctccttactcccacactcctccaccggcttgttctcgacctcgctcaacctgcccagatggggtttctccttcaagacggtgatccccatgggccgtacaggcgtctgcgtccagcggttcgctccgacggctttaggcaaatctcgtcgcaagacatacttgtgagcgaccgtgtgtcccggatcgtagatggtgttgaaatcgatgatagccttgtcgtctggagtatcattgttatcgcggggggtcgagtcgtgtaatctaaaagtctcgagggttttcggtcggggcctcttccttgcttgcggtttaaagtccgagtatcccgctatgaattcctcgtcgtcttcgtccatcgaactatctacggacatgttgtccatgcgcaggtcgtcgttgacctcggcttcaatctcgttttcatcgaagtccgagtcactgttcgagctgtcaggttgctgttttctgatcgacgagactttggcgatggtagcttttcccttgccctttttcgacggtgcgcccttttgctgatcgttttccgcatacatttccgatgcactggagtcgtcactagatgctgggcgtctttcgggatcttcgtccatcccttcgatcccttcaaaggccgaggtgacatcgtaacgaactcggggggttcgtcgtccgcttcgccgggagggtccagcttcgtctggagaagacatggcttgtctcgctgtatgatgcctaggatattgtcgactggtcagaaggatatggagttcaaagtgagtactatgtggtgttggatactggatgagacccggtgatgaacggtgcaaggagcaaagtgcgactgcatgagaagccagagatccagaggccagaggaaccctaggccagaggaaccctgtgcatgaatccaaaaacacaacaaacccccagagcccgttacgaatcaatcgaatatgccgagaaggagaaagacgcgcgcgtgacctggtaatagagtgacaagacgagaaatcgcgcaaaaagggcaaaaagaagttggtgccgacccggcacattgcgcaccctcactctccccacttccaatcctcagttaaaggttgcgtacgccaacacagatggactgttcggttgcccgcctagcccaagcacacattgctgcatacaaatctggttgattaccgacctaccgtgatgacatctccccgcaaagggagaaaacccaaccatgaggctaggacacgagtcgaacgcacgaccccaaggagacgcgagcagagatagaaaatcgagggacgcaaatgtgttgatccgcgataaagcgcaacaccttccccaaacccactacaggatgacggtttctcgcgcaagcatctattatggcctcacccaaactgcctcaagccggcggtttgtttaccttgttgatctcggttggatgatcgcctctaaagctcaggactttgaatcgtgatattcgacctctttactcgacttgctcatcacatgtcatgcactcctcgtcaattcgcaagacactgtacacccatgcatatatactcgagtgaaatctcgagctggaacagatcttaaccccggttcggcctctcctggataactctcgatgacccccctttccgatgacgaatttgacgacctttacgactacgatgaatccctcgaggtggaaatccaacgccttgagaccgagatgggcaacaagccaactgttgagcccgtgaaagaatcgatcaccatagcgtatgagccatcgcaatttctgtcacccgctgttgtcaaggacgaagtcgatccttcagaggtggccttgtcccagagctctgctttcgaggaggaacttgtggaccaagtgacgaccctcctgcacccagcggtcaacgacatcgaggaaatcaatcagacaagtacagatcctgatgtcaagatcatccccctgtcggtggacgagaacggcaacatgctggaagccgtacagataatcaaggatgaccgaagcttgttccaacggttcaggaaacgagaattcttcagcgtgtccgatctcgtgggaccgctctggtgtgaagtacaatacgactagtaggtccagtctccctcctgttccttttcatcccaggctaaatcagattcgatgtagccgtctccgatccaaaccgtacctcaagccggaagatcgacctgctatcatcgtcacgcgggaaggcaagcatatacctctgaacaagatcaaagcgggagatcacgacaagattatgaagtgaggattttgtcaagcgaaaatcagtagtcatttgcccgagttctgatgcccatgtggctcactattattagaagaggagaagtaagcctgtcggcgaggttgcatctgctagggcagtccatctgatagccatcatgccgctacagatcgtacataagaaattggagaaggaaatccatcctatcgaagtcagagtaactactacgacgagagaagatgtctggggtctgcggtatgttacctcggtgtaaaatgaccgatcgagctattgaaactgattaacgtgcttcagattcttgaacatgctttcaagtctgcaagctctgctcgatattggaaagtgtcgagagcttcccgttgtcggcttcgtgcgcgggtacatggtggttggtgtcatcgtatgtgctccatcagctcttctattccgctcctcgtgccgtcaccgagttggccttcgtgtatgcaggacgagcttgtcttagagaaaatcgagacgccggaagacacgcagtccgactcaccagagcgaaagtcacaacgcctcttgacgtcgttcttcgcttcgaatccgcaatcaaagtctcgaaggacaaataagcggacccaccgcctacttgtgtccgactcgaagacgagggcgagcggaacgctcccgcgacttgataccgccaagagcgggatgacgcaactcatgtgctacaaggagattcttgacggtatgttgttggcgtccaacgagaggcatccttcgggcaaatcacaccgaggtctggctacatcggaacaaggggacaccgcaaccgggagtcaggcatgtccgattacgattgacgaggattctggcaccgttttcgagcccgctgcaagcgaaacttctcaacagtcatctgctctggctccatccgagctgaaagatctaggcatctcgaaagatcaaccgttcgaagattttacatgggatttgcttttcagccatcttcatctcgacccgaatgcgacgctttcggagggcttcctagtcgagtctcggagcgttatacacgggaatggcctggcatcacgattgtacgacagtctttgtctctgggattacgttgattgctgggtggatttggtggaaagactcggactgggccaagtcggacctggagccgcgaacaactctggtcggacggaagatcgcctggagctggtctatcggaacgttcggactacgtcgaccaaggtcgatcgaaagcgcagatcgcgacgggtcaagggattggaccatgatgctcaagcttctgtcctgtctgaggagccgatgcctatgttccggtcctccatggaccagattcagaggaccgaagagaaacgtctgctggatcttgcaatcaaagagagcttgagagacttgtccgagcccacgtctgttaacgccggcctcgcagaaatgcgtagcttggaagagacgctctcaccgcccagctcctctaaggagaatgggaaggcagtcttacttcaaacgcagacttcagcaattagccagtctgaaacctcacagacgtcgctgaacgtagatgattcgaaaccgttggaactcaggcaagagaccgtcccgtcggcggagactggacaggccagtgtcaccgaccatgatcgcgatagccagactgtcgcagagctgtgctctagcatatcatcgaaagtcgacaagaagagcaaacgaaagcgacccaaggacggcagtattatcggttctcacgtgttcacccacgatcgagtctcgcttgctcacagcctcgaaagcgtcttgaatttctggatgggcaccagacagcctgcaggcgtcggaatcgagaatgtcaatcggtgtgggtggtgcgaattcgaggaaggctgcgagtggcggtgggtactatactctccatgcttcggagagattctttcactgaacgcctttctgttcacagggacgagaaggccaaagaagcggcagcaaaaaacagagcatcgatgaaaagagcgtagaatgggcccccatccgcacagtacacgtgttcatatgatagcatcatgccgatactaccgaagttagtcgatgacatctgggtatcctcgagcgtttcttgtcctgaaccgcaagtcttcgctgccttccagtcctgttacgcgtttaccatttccacatcccatcggactgggcacgacacgctctcggtccacctgcggaaatcctcatcgagtgcgatgaaagcggaagggagttcggtttccaaccttacagtcttttcgatatcgtattcgtccctgccgcaattcctttctagcgatgtacggatcgatttggacacgttggcccgagcggtgcatagaagcgtggcgatgccatggcctcgtgcgcccgtggtctgtgtcctctgtgagtccgtattgatgagtcgggtggtctcggctctcaggtaatcgataagcttgcggtttgtcgtcgaggatgtagacgccgccgagaccgatcgtactgtattgctacacaaactcattgcagggtagttggtatccatgatgacgatcagaagcgcgatgatgatgtcagaattgggaagaagactcgggtcggttcagcagtagggttctgacgtgatatcgatgtgataaggtaatgtggatcgcgccggtccttacacgtttttatcctacgaggtccacaagtgcgttcgatagacaatacgttttccgtctgaaaccaagctcctggcagactggcgcttcaaggagtcacagggtgaagtgaaaggagggccttctttcgaatcgaaacgtcagcacgggaggacaaaagtgggatttgaaacggggtaccggggatcgtcactcgccgatcttccgaggtcccggttcgacatctgccggacgaggctgggggatatcttgcaatgtcaccaaaatcgagccatgacgtcttgcccgatgcagcgatcagagtgcgctcggacgactgctcaggaagggttgatcaccccagtttcggatgtaaagcgttcctgcaatctcccgcgacgccattgccgtgtatgagctcggatctttaagctgccgttccgtggctctgggccgctcgagaccggcggtccgggtattacccccacgctcgggcgcgtggaacggcgtcctggcgacaaagaccggtcctatttggcacaagcgcacaagtgggaccagttcccggttcgcgatcggaaactctatcggagaaaatgtctcgtacatctcctcacatgctcacatttttcttttcatttcgtcgacgtcgctgactatccgggaggacaattatcccacggaacaaaggatcaagccctcgaaagtaccccaaaagcccatgctgacagaacgggacctctcgagacgttcgctttctgatcccaacctctcgtcatctgcaaatgtcgatatgcggtttctttgcatcaaacccgctcggaccccaaaatatgacaatgctcgaacctccgcggcaccgacgatccgggtaactgagaaggcatactgacccatacgatcaccgaacttcgaagcaaccctctttctcatctgcaatacggctcccccgatggccccgacgacctcttttcctctcccggaaccagctaactcggccgaagcccatggccagcatgttcaggtcattgtcaaatcgagtataagaagcgagactcctagagtcgattgagagtagattcgtcttgatctctttcgttcacaactctaagcaactcgcaatcaactccaaaactcgactccaagtccaactcaacactcagtctatcagattacttccacggtacactttaccaacacagtccttccccgacaagcttcctcgctcgcacttaaaaacgcaaccaacccaaagcacttcacctcctatacaagatgttcggacttaccaagattactatcgtctccatccttgcctctttggctatggtcaacgccgcccctgtcgccgaggctgagaacaaccacgttctcgaggctcgtctcaagcgtaccggtcgttccacctggttcaacgtcggactcggaaactgtgagtagcgttcccgagtgtctattgggatttcggcgctgaccttgtcgccctcctttcgttataaaggtggatggcaatctgatgacaacgacatggtcgtcgccatcggcaagggtctgtacgacaggaacaacggcaacaactgtggccagggaatcaggatcaaggccaacggcaagtcggtatacgccgtcgtcgtcgacagctgccctagctgtggagactcggacctcgacatgagccccgccgtcttcaaggcccttgccaacaacggtctcgatgacggtgtcttgaccgccaactggaacttcctcaagaggaactaagagagcgatcgatcccctcgtgcgcgatctcgctatcgatcctcgttccataaccccaaaattccttctttacgaacccttcactctcggtatctcttaagtcttgggaggccaactggtccaacacaatcacctcatattaccgaatatacttcggatcacgctctttcgccattgcccctgaaatgacgacgaccttgtccggtcgggtttgggctcgacggacctggcactgtttctctttaaaccacaccctcgttgtaaaccggtcataccggccacgccaaaaagcactgtatatcttacttgtcgtgcgcaccacactcgcttctcggcctgtagatatagataggctctcatgctatgctgcaactatatgcgatccaaacatagctacaacttatcgttctgctagaaagacgtcgtccaaacctttcatcctaatttgcttccgaacacctatcgaccgtcagtgaggtggagggcagtaacagtcgtcacgattccgctgcgctcaacaacggccctgcctcgatgtcgtgacgattgctcgtttactcgcacctgggctctcgatcttacccatcagactcagattcattccggcgtaagacgtcggctacagccaattcaggacgaaagagggccgccgccatgacgctatcaacctagacgcacatcggaaagatagacagggacgaaacggtcgagcggaagatgaacagtcctggtcaaagctactttacggagcagctggtcggaaatgtgttccaggagagcaatttgatctcgttcagccatactgaaggttagccttcatatcgagcaacctggatgcaagacctaacctcgaatcgctacagttggtacatcgtcttctccggcacaacctcttaatcgcctttcagctcttgtttctggcggagctgctgctgcaactcgacgtacatctcagatcgggagagcatcgtctcctggattatcaggtttctcattgcgctctgaaggattgagcccggatatcaactcgctcggcaccgaaaggccgagggcgaaggtcacatgttcggtcggctacggtaagccaagtggtctctcatatagtccatcaggaagctgacgacactcgtcgaaaccccttctctacaacaggcaccaacttgtatgtaggatcatcggatggccaggtctggtggtatacactcgactacaatagcccgagcagcagcacgaacagcgtaagtatacatgggttcgtgttggtggttgggtcatagctgatcttgagctctcaaagcagtctggcccgtatgtactgaagaacggacacaccatagcctctagaaaggctatcgacaacatctaccttttgcctcgagtggggaagatcgcggtccaagctggtaagagcctgcgctcgtagaaggcttatactggtctcaacaccttcctgtctctgcagacggcacgctttattttctcgcgctgccgacattggaagcacttcctcatggaagcgtgcaaccgatacgggacgtgatagatgtcgcgcttgatgatctggagattgcttggcggccaggcgatgaagagaatggcggcaagggcgtggatattactctcagcatcgtcaagcgcaaagccatctcgatctacagactaggtcataaactgagcttcatacaggtgagaacgcttgatatgtaaattatcgcctttaccgctcggtcgctgagccgtgtctcttggacggcaggatgttcccctgcccgataccttgacgcgagccgttaggtcaggtgggacgatggcagtggcagactcttcgaaatactgtatcgtgaacttgctcgaccagaacatgtacgaggtcttacccatcgctcaagtggatccggctgaagccgggatcgaagggtcactcgagatcaacatcgcggtcattccgggggaagaagagtttctctgcacatcgtttgcaggatctggcacaatcggcgttttcgtcaataaagagggagatccagtaaaggggaccatcacatggcaaagtcacccgaagtctatcggttcgtgggaatatcagctcgattgggctaacgtgaactgacgtacctcttgcgcggttctagtaatcgagggcgattcggtagtggcgctgctacgcgacgacacattgacgatccattcaatgtcgatcatcgcaagtgggacgggcggaggactgctgcagaccatcgctttacctctcggatctgtaccgctgcacctgacttcgaacccttatggcgtcgcaacgccgaatcgattacgagacgataggctcgcggcacgctcgaccagaatcatcctgtcgccccggcccccagcagaactccccaggctgagaagtgacgataatctcctggacgccgagacacccttcgagccgccccctggttccggcctctcccctccactgttaccgttcgactcgtctcatcgaggtaacagacccccaatggtcacgcaggactccaccggtattacctcgagacccaccaccacgacgatcgcagaaacacttctatacaccgacgacgcggtcatcgcgatcgcgccgagatcgtggctcttgacagccgacgctctcatcgactcgggaaagctagacgaagccgtcaggctgacagagtctcaacgcagaaagggaaagcgaggagaaatagacggcgataaggtccgtcacaaattgcgtcgtttctcgagatcatgctaaaaaaagtgcattgcagacaagtcacactgcagatttgaggtacatgtattgtcggatagcataccagacttactcgaaggctcttttcgaggacgctggatcgtatttccaaaaaagcaagatagatccaagattcgtcattcgcttgctctctcagcacgtcggtaatagcattactcctgaagatgaggcgataatatggcagggcgcagagcgcgactcgatttcggctgaagagtctcaatcgatcggtgagttgccgggtttgattaactgcagtcaccgaacccagcactaacagcatttgtcagtcgaccacaagctgcgacaagtctatggatcgtctctcgtcgacgtcgagacaccatccgccgaagtcagagaactgcgagcccagctatccaatctggccaaaatcatgataatggagtatctccgcaaggcgcagtcttctcgccgaaaagtcgcatccaaacaggagaatggaaaagatactaaagtcatgcaggtaaatgcattgtaactgagactttccgctgcagaattgatatctttcgactaacaggcgatagacacaactttggctaagatgctaagcgaattcggcgaggtagaagaattacttcaactactagcgggacccaatgactgcataatcgccgaagtggaggcatccaccgatgcgaaaaagtacccgtatctaaaatgcgagttgttgaagatgaccggtcaaaaggagagattactgcagggtctggccaggtaagatggaaattcctgctcacttcagtttaatgactgacttaagccaatcagtatcgctgagggcgagacgccggacagccgatgtgtgaatccagaaggagaaattgcacagctgctgctcgaaattaccgatcaatccctgcttcacaagtatcttttgtggctactgaagagagatgcttctgccgtactgagagtcagtcattttgcctgacgataacttgtttgcgctcctcttacaaaatatcgctacaggtcctcacgaccgttgacggacgtcctggatgggcatttgacactgcacaactattggaagagatgcgtgagatcgatcagcaggcagcgggtgactatctcgaacatgtcgtcgtggttcgtcgcagcatagtaagtacaaggaaaatgccctagatatcacttgcagtcttgaatctctttgggtgcgacaggatcgcaaatttcacgatgcctatgtttcgcatttgctagaccgctgcgaaaccttcctgaaagacgatggcgttgtttatcattttcaagagctatgtaggttctgcattttgaaaatcagacttcaggcagggagactgatctggagcgaacgaacagtcgacgaatatttgcagatgcgcccgaatctgacttactgccaatatatcgccgaaaccgcccacgaatcacctagcaaaacagtccgactcaagaccatcttattcttgcaaagctcgccatttttcgatctgaagaatgtcgaggagcgactcgaaaaactggaggcactcttctatgagcgagctatcatttacgggagggtgagacagacaatcttcccttgaatcgagtcccgagactgaccgcaggactggcgtagctcggcaagcacgacaaagccttgcgcctgctggctttgcgattgcgggactccgtgtcagcggagacttattgtactcaaggtggtgaagttctacctcccaagatcgcccacgcagtcacaagcaaaatcagaacgttagaaccttgggcgagtctaggcgaagtcggaaggaggcgacggggaacgatcgaaggccagctccgtcaagaactgatctcaaccttgctgaaggtgtatatgtcggaagggtcagttcttcgcgacgttccgatgcttccgatggggtgaagctgaggttttgtcccgatgcagttcgaacgcgagcaaagagaccgccgctcttctcaatgcccaagcccttcatctggatagccttgaagtaagtgctgaagcgcccatcctggcacttcctcgctcagccgatgttctacatataggtcctcgacatgattcccaacgactggcaggtgcgcgatatgtccgacttcttcggtcgagccctaaagagacagctgcatgagcgctcccattggcaaagtaagttgaaccaaattcgcacggctacctcgaccttgactgagcgacatatagtcatcaaggccctctcggccggacaaaatatgcatatctcggaggaatacgcgcgaacggtcggaagacagccgccaaccatcgagtacccccctaagccgccatatgcaccaccaggcgagacagcggagcagccgcggatgacaatgtccgatatgggatcccccgatgaaggttccatcgcagacatcgaataccggagcatattggagaaacggtcagatagaggcgagaagagtccaatcgtcgaaaaactagaatcgaaggagacaaaatcctctgacctgccatcgaaagaaggctccatcgatcctggtctacacaacaaggaggtcatcgagacaataggttccggtcgtcccgagcacttgttatagccagcggtgaatgcagtgagctcgccaaccaatggaaatatatacccctcgaatatataccccagttaccgcagttcgacaacaacggaattatgagcgtcgccggtcacattccaattgtatcaagcatgacgagcgcagccagctcgaggtatcattgtttgctagcgacgcaatcgacgttgagttggtaatcttgtataacactgacaagctcttgctctgtcctgctaagcttgcctgcttcgggatttgacagtcaccagcgtgcacgtagcatctgacacactggctcgggacaaaatgcagcatcctgtatcccttcctagcgggatttaaggatttgaagcacttactcggaatcttcatcatcccagctctgatccgctcgcggatccgatgaccagacccgtcattccccttacacatgtacaatgcgtggatatttgtgtggacgacctgatttgcagtgtcgtaatttcccgcatctctagcttacaaatccatagcagtataattgaacagtgaaaagatgatgctagacgtcgaaaggagtgatgccgcaagctagcttttatgggtttgcgaggaagaagtcgggcagtatccgacgtgaagacgtttatcctgtcactggtccttcatgatgcgtcgataccacagctcgggatatcccatcccccgctcgcccaaatcaaagacgaataaccccgagatggccgccacgacaagagatttcagttgattcatgcagtctgtatcagggtgatgttgtctcccttcaacatgatacggcctggattatgccggatgagagaaggattcggtttcgatcaggagcgaacatattacggagcgaaggggtaagatttagattcagattcgataccttcgcggcgactcgcggtggaaggtgacgaaccgatttctctccttggcttttgactcttgacgtagacctcggttgcgtcctccaaaacgacgttcatgaactcgtcaaaaccctgagaaacagatcggagcatgttgcgagtcagcctgtcatccatgcggcatccgacgagtatgttctcgacatcgcaatacatcgctgcatgtcacttctataacaggcgctattccacggacaaactcacgatgatgactccctcgattctcaagtccttctgatcatacagccatagcagcacccttgttttctgttcggttggcagccgccgggaatccgcagaaccgattggcacgggatggacggtgaggaggatatatcgacatcgatgtgaagggcagtcgcaggttccagcaatcgcggcgggcgagcataatagcaatatgcatatcgaaacaagaataatcagtctttccacctcgtgaggcagatctcagatcgaggggggctgctaacggtttggaggtgcttgaagataacgttctgcaaacacggtaggggtcagcttgagaacctgctgatcgaccaacagcgacacggatccggaagacgcacaataggctggacggcgattcgcttggacgacattttgagtgttcttgcgggagtgcttctctaatgtcgttcgtgcgggatacacggacagcacgttgagcatatgaagaccgagttgaccgtcatgacaacattgcttgggtataaagggagatcagtcgtgtgcacaaactagaagcgcgtcgatcaagcgcatcagtcaaccatacatatgaacaaggtgatgacgagtcgctactgagaatggattgtttgctaaagacaggtgtatcgaactaaacatagctttggcttcacttgcacatctagaaaacgatcacaattacgatggccatcatttctgtcaaagccggaaggtccaagcgacgaggagagaccaactgggtggatccgcagcccgcgaagggacgcatcgagattgaagagagtgatggtcttcttacattctgtacgtgcaatgatctttctccctgcttaccgtagcgaagaaggagcgaacctgttgctaattgcatgttctacatctcttggactgccgttcacagactggaagagcagggagggcggaagtatggcggaagacgacgtgagaattctacccaagtcacgattgcgctctgctgattaacatgtgatgactattggcttgataggaactcatcatcttcccgggcgattgtacattcgagaaagtggattctgacttgtcgggaaggacccatgttttgaaattctctagctcggacagccgagatttcgtgcgtggatcggcagatcgtccgctcgcaagcaaagctgactttatgtttcaaaatcaaaacgctcagttctggttccaagaagcatccaccagtagggacgagacggatgctttcaacatcaattcgctgttgcaggaccccaactttgctcctattccttacctcgacgagtgagccccccgttatgctcagtcgaacacaacgtctgatatgtactaagaccgatatatctcgctttctagccccgcacctgatgctggactcgctcaagcagccggcagtgcgatgtcttcccttcctcctcaaacgcctgcacacaatacgtcgtcgacctcttcgaaccctgtcatgccggaagctccccggcctcagcgtatcgcagactttcaggaacgaacgaacgacgccgtgccagctacgcccggagtcagcggatccatggctgcggcgggttctgctcagccgaaccagccttttagtcaggagcagattagtgcgattacaaggatgttgaagcagagcgtgcagaacgcaggaggtgccgaacaggtacatgaaggtatgtgctcaaactgatccctcttggatattgacctcttactgacgactccacgggacgaactgacagatgcccagttgaccgacatcctcacatcaacaaatctcatccccatcctgacttcttcgccgacctttattcattcgttgatccctcatctcccctcggatctgcctctatcatcgccaccaacccggtccgaaatccaatccatcatttcttccgcacaatggacggaagctgttgccggtttcgatgcagccctgagaaccggagcgctgacggggaccatgggaagtctcggcatgagcgagcgggccgggcaaggagtaggcgaattccttgaggaggtgatcaagaatggcaaagaagaggacgaggcggtcgggcaaggtggcgacaagatggataccgattgatgcgttgggtaatataacgcagttcgtgtgcctgtatgaatttttgtagcgtacatgtttgtcgctcctttgtcttttgttgtcagtcaatgcatacatcctatgaaggtcgtcaaagaatcgctttcattcgctccacgagtgcgctgactgaagacacagcctcttcggagctcctgtagaattcagccacatatatcagtcatggaattgtcctcgcccaaagcgctgcttcctcaccaatcaagattcagcagcatttcgtctatttcctcgtcttcgatttccaactcttgtaggataaggtatacagtctcagcagtcaaggcgcggacctgctggtcaacgatggtgagcccatcttaggtgtattcgacttttggtctcgcactgaccctaggatatgtatggctgaagaagcaatgtattcgctcgagaatcgcttctctagcgcttggcactttcaatagagacgtcatactgtgtgccgagacgatcagctactccccctatcagcttgattagactcgatacgcacgctttcatagccgttattatgcgctcgacattcttcaggttcggtatacctctcgcgctcagaagaacgagctggcacagactgaactcattgcttgagttcagtttcggtcagcgattgagcgtttcccgcacttacgcattgaccactcgctcatcattacgctctggccaaagatcggcggacgccaattcgtgggtggtcgccatgcttggaatgaaaatccggtgttgggtaaagtgtttcgcagcgatgtgacctagatctgtggtcacgtcgcttagtagtgaagactcaggtgagctttgcagtgtttcaagcagtgaccggcgagcagctgtgttctgttaaggggagatggtcagagcgatcagactacaatcaggctacgatcaaagagcccgacatactatgtccttgttcttgcttccaatactggtgatcagaccaagaagaaggggagagcgcatctcggcatgccttagcatcggactgagtgttgaaaagaccatttgcatatctttgtgattgtgaattctagctctggtagtacgaaccgtaagcagtcatcttggcatgggaacgtcatggaatgaaagactcacaatctcgtagcaagatcttcggtccaacctcggtgatccaactttggaacgagaatcgcgagcgtcgacaacgcagcttgacgcaccacctccaatttctcgaccgcaagcttaagcatccgagctacgacaagctcccacgtgtccatcgaacagatcgtcgtggctcctggcagcgagctcagacccctacagcagctgacacgaatccacgaaccaacgtccccgcgctggtccgtggtatagtcctccatgccggcatgtagcgcttccacgagtgcgaccagccttgcaactgaaagacatcggtaaatttagccgaaagataaaggtcatacgtatataataccttacagctgaggctgttgtccttggtgatcgacaccaaggcatcgaatgaagctcttcgcacttccacttccggtcgtggcgacttttcatggaagggatgttaggtctcagccgggtgtaggtgcttggttgtaggtgtgaggacgcaccttagccgtgctgacgttgctaaacagcaaatccaatgtgtcattgagctgctgctggtgtgccaggaaatctaccttcccgagcgccagaacggctccgtgacgagcaatcatgcgacctccagcagcgctgaccaagaaggtactgggcggagaaatattcattttccgaattctgaaggcatgaacacattaactcatcttttaatttcggtcgtgcaatctgtgaagtggctaacagcgccgaatgcctgggctgcagcaacctggacagactctttcttgttctgtatgcccagatggacgattttcagacagactgccttgattgatggcgcttgggataacgctgcacacgccgccgcaactatgcagtttgcaccgatttcgagaagcaggtctgagccgaacgtgatccaagcagatccccgaacactttgcaagctgtccagaatcttgaattgtgccgcctgattagcctccaccatctccagtaccgatataaactaacctgggccagtttctgatcgtccgagcggtataagcttgctagttccgtcagagcggctagagcgccatgaacgttgttcgagtctaacgagcgtaggttttcgatctgtgaccgtcaagcgaaggagtcaatcgggcgtagctcgttatcgcgccagcagacgatacacgaacctctaatttgatagaagtgtacgccgtgccctcttctggcttgatgttgcacatctctttcaaggatgtagcagctagtaggcgtatggtgggatcccaatgtctcagtgtagtgtgatggagacagtcaatcaaagcataacggtagacgtcatgccttttacctgtcgtcagcgttgtttgtatcgatggaaggatagataactccgttgcttactgagcgacgtctatcgccgctgtcaagaaagccgatcgccgcacactgacggagtagaagtcagttctacggaggacatcgattccgtgcggaaaaagtccctgtcaacttggcttcagctttggttggccactggcctgtcggcaatccttacgtaccatccggccgacatgctcctgatacgcagcacttgcggctctacgtatacccacctctcgatcgaagcaagctactgcgaccagcttggcagcgatctcccgagcgaaaggagacatgctgcgaggatcggatgcccgcgccagagaccaggtgaggtacgctgccgcgtcccgcacattggatccgacggagtgcgctcctcgtttgatgtcgaaggtcagggcctaaaggggaccgcgatgtgaatgggatgttgcttgctattcggctgatgtggcatcaagttctctgaccttgataacccatggtaatgtttctgctatgtgcgcttcatcgagtaaacccctccgagcggtctcagccagcgccagacaaacgccatgccatctcgcgtcaccgcgagagcccccaccagggtccaaaatccttccgcgatttgtctctactacgggttcatactccgttccggtaaagagctcgatgagcgcttcgattatctgcgtggataagtgctgtgggaggaccgatgccaagcgagccacatatttggccgcggaataacggacaacggtgtcctttcgtttatggcgtaagatttattagcgtcactgactagcggagctggtcatctgtatatgcgtatacccactttgtctgatagattctgcaacaaattctcaatctcttcctcaaaaccttctggaggttcaaagtccgcaaagtcgtcgatatcccgccgcgaccacatgcggtgatccagagagtggaggacctcgctcgaaccagaacacaccgagaccggaactttggcagtacgcttttcattaggccggttggttcctattttcaccatccaccacctgccttcggctttgacggccattttgcgaaggaggctagaggtggcagacacgccgctatccatgtcgaagcgttctttcaagacgtcttggtgaaagcaacgaagttcatcgagatgaactcgtaaggcatctgatgggagtaatcctggaatgatagccaggaacgataggatattgacgagctgatccgggtacacgattagtcacccgattgacgtctcacagcgcctctctcaattcatcgctcacaaaagtctcttccaggccgtcatcttggttattctgtttgtccagctccgatcgaacccagccgagaaaggactgcaaaccaaccgcgcagtccggtctcgcatatagcctcgccagggtaagcgcagcatattccccctccttggaaggcttgtataagagtgggtggctaagttcttgcacccgctttgccgtttgagacatcccatctgacgaggagctggtggccgattcatcgaatgcggagaggttgaaaggtatcgtcatcaacaggcttagccagagtagcaggaccgaccggagctcccatgaggttgccgacgagatcactgggtgatataaagttccggttgaagagtaagagaacaaattgagcaacaagggaagattgtgtacttcagatggcagatgggtcactgcgtagaactgtattttagcttcacgaagcgtgcccagactttttcgcttagctcaccgactgccttgcgacctcgcactttgatcacccaattgatcaccttgccaacccgcccgagccttgcttcattaagggatggttctgcgtatctcgagcttctgtaatgatgcttgtcggctgcaattgttttggcgagatgatcgcgtagcaattgaaacaagggtggtataatcgcatgtagatgagggtccaacaaagtcggaagtggaagatagtgatcaagctaaaacggacagaggtatcagaaatggaaatcgatctcatatgcctcggccttactatagctccgatcgattcgacaaggcgatcctcctcgtccgactgctccgattccacctcaacttcatccaagcggcagctcagaaatcgcttgaacagagcgaagaacgcctctcgatgggcaaaatgggtgtatgtggcttcctcatctgattccattgtagcctctagctgaagggatgcgagagctgcttgatgcttggccactttaggctaatgtagataggtcactaatcactactaattacatatcattcaaccgacgagcagcaagtaccagcagttcgactttggggacccgatcgcgacaaagtaaacaacgaatccgagacaatggatatgcaatatgatggccaccgctgaaatgccaatggtcaattaggtgtatctatcgctctgcgctgtacccttgtcacatgatatgtctactttttcttcttgctggcctttttcttctgcgaatttctggagtctgacttgtcgttgtccaaattcatccaatcctcgtcctctccaagcggagtgccagcggaggacgtcggttgtgcggtcgatgacagcgaactctcggccgcagcaggtttttgtgcatagtatcccactgtgggagtctcatccatcttagaggcctctgcccatgtgattgtgtttctgctaccttgctcggtctcgccctcatcatcgctccatttccatagctgagagatctcacccctcgccgctcccatcagcaggaccatgccgactgtggccaagtgggcagtcagtcgctgtatcttgtcgggttatttagagagaacttactgcaagcaggcgacaagtagagcagagcgggttgagcggcttcaaagatgtgcatgaccgccacggtagtagcgagacccccgatataagccaccataaccgccaggaagtacggtttactgtacgagtcggcggctgacggccgggcgtcggggttccgcttgagagtgcgacggacgtacgacgaaaagtcgtatcgcagagcaagcgatatgaagattccgggaatcacaatatccccgagcccaagcatactgaagccagcgtctgcgttgtggatatctcgaggggccaagacctgtgtcatagtagcacaattagataaccaggtctgccccaatcgcgaaggttcggattcaccttgattggtgcatccaggttcttcgccacggtgaccatgacaggagtaccgaacacccaaaagatgtcgtagaagaagagtccaatcaacagagctcccccagtcttgaatccatcaagtttcagaacactgatagacgaaacggcgaatgagaacgacaagacgttggtgatgtaccagggcctgtccatgaagatatagatgatcggcaggatgatcgagaagggtataacaacgagcgatatagctgtcagagggatatgcatcatctctgcgctggtttgctatcagcatcaaggaaaacgatcgtcgggatgatatccgaagcttacgcttgtagcctttctctatgcggaaatgatatttggtgtatggcttgctggaaaacttggaccaagctcccttgataaggtatgtgaaagtctaccagcatggctggatcaagattagactcatgagcttcatagaatggataagaattcttacgtattgaaaggcaagcaccgaagcgaatgcgactggtaagccatgagctcagagtaagctagaagaacccggagacagtgatgagtggcaactcacagtaaccgccgagaatcttgttgatccatttcgaatccagatacttgaagacgaggaacaatccaagtagcatgcatgaagcaatgacgggaaacagcaagctgtcggtcaagcctatacgctcctcgacctcctcctcatcttcatcgtccgagtcatcgggattgaggatgacttctttctgagtttccttgcctcgatggcgtatcgatttgggagtctgtagttcgtcgtcagattccgtcaatcgagcagatcatcgcgcatagccgcccttgacacaccttgacactggccaatgacccagctataatcggcagtatagcttggactcctagagccgcatatgcatagtatagcgaccagtcctcagatcccgctcgagcggacatcttgcgtaggattaggaggcagagaaggttctatggagtacacttgtccagggtttagtacctgcatttcttgaaaagggtaggccagctagctagagtagtatatctgtgtcggccgactcgccgggaacggatcggacccaagtgacgatcgacactggatttgcctttgacacgtggcaatcaagtcaagtagaacgaggcttatcaagaaactctgatttgaaacgctgggctagcggctcgaagatcaagacaaaatactactagtacagattgacgatcaaagcaataaatgcctgaacgtcgacaagcaaaccttcagaccgagctattcgagaccgaacgattgtgcgggcgatccgcgatctcattccgcagtcagcttgaaggtcttcttgaggaaagcctccgatcggatcaagctatctttgagattctcgatcttgcggaagccgtgtccttcgcctgcagagcgcggcatcagacaccccctcatatcgaacagagactggtagtgtaagactcaccttcatagaagaccgactcgacgtgtccatgtccctcctcgatccgtttaatcatttcacgagctaatagacgcagtctcgtcagcttgaagccgggctacttcggtacactgtctagtcaccttgtgaaggaggcacaaccttgtcatcttcgccttgcaaaatcaaagttgcagcccggattttctctgctttgaacaatggcgagcggtcgtggtaaacttgggggatctcttccggtgttccgccgacaagctggacaagggatcagacttagatgatcggcaacgaatacgaaacacccagaaggcttaccttgaacatgtattgagactgtgacaagatggatagaatcagagaggataagaacagtagcatagagctacagtcaagattaggaactgacctcgaactgtaggatgcaacggtacgacggcatattgatcagcatatgtcttcgaattaataaacctactacccaccttgtgcgtgtctgctaccaagaggttaatgtcggtgacaccaaagagcgagattccaaccccgaacacacggctgtccgtgagacacgcgagcgtggtgaagccacctgcagagcctcccctgatcccaaccttattgccatcgatcttgcccatctctgcgagcttgctaaccgcatggacagtgtcatgcacatcgactattccccagttgctctgccaagagaaaactatgagttcccaagctgaccagggcatccgccgacgcagacctactgaaagacgctgcatgtattgacgaccgtagccggaggaacctccgtctgtttggtcagatggatcagaatgatttgcgcttctgaatcgttatttgagtctcacagttgacatcaaggatggcaaacccccggctagtgaagtactgataaaaggagttgtagacagggtgcgattgggacgtcctgtcagattgatgcttgcaaccgcatcagtaaagcgatataactaaagctacctgtctcgactcacggtcctccatgaaccccgactagacatggtggctgggtgccctcgggagccttgaacttggggttcgcaggagggaacaaggtgacgtggatatcgacttccttggtgtcactgcccataccctcgggcctctttgctctctcgttccatggaacgaccagggtgtacgtttcgggctcgctcgcataatccggatcgacaggcttcttggcaaactccgccggggtcgtttgaatctcgctaaagtcggcgtgtccaggagaagagcccagagtaacgatgacaagggtcgatgaagcgtacgacttgctcccaatgaatacggcttgagtatcactaagtcgcttcagctggtcaatctggccgtatacctctccccgtgccagcggagtaatcttgccagtacgaaggtcgaagtgcgacagacaaggtcgatcgtgcgagggtgccactagcgccgtttgcccggaaagcagcgcgtagtcgcacgtccccagcgaccacatgggcgtggtgaaatcccgatcgaccgacttcatcgccaattgtgccttttcaccttgcttggcggtatcgacgacccagatattttggtatcccgtctcgtctgaagaaaagaacagcttgtctttgctctcgttcagtccccaaagaggctgggtgacgctgatagcgttcgctttgcccgcgacctcgacaacgttgaccagttcgggcttctcgccgagcttcacgtcggcatgatggagagtcgcgccctcccacggcatatcgggatgcgaccactacgaaaggttatattcagcaaatctgtccacaatattaccaaacggcggagcgaagctcacctcgatccaggcagccttgctaccatcatgattccatttcggactagcgtagaagtcattgccctcgacgactacagtgacggcagtattcttcgcatcgatgacgaccaatgtgttgacgaccttgctaggttcagggttggtgtgatcttccctgattgcgaagacgagatcggggttttgcgggtgaacggtaaagtcggcgtatcggtagaccttcgattctggagtatgggcaaagagcagaaccttgataagactctcttctgttggccgaggactacgatctctacgtaccaggagtcgcgggcttgacagtatcagcatcttcattgaccttgaccctgaagatccgaccgtcgttgaaatcggagtagtacgcccagccatgacgaagttcggcagcggcgccgccgtactcatgaactcgggtcctaacgttggctttgggtccgacaaggtctttaccgggtctcagagatttgcacaggacggatcgacctccttcgtgcgctcgagactgcgcaaaggggatgtgggggtagatcagcgacaatcggtttcaagttgatcatgaccggagatgaccgatggtgagatgagctttacctcgacatggtagatctcttgggtagtatcgtctacatagagctcagcgagtgtggtcgcctaaaggcaagaagatcttgagtcagttataagccatgggccgctcttcgtgactgttggaacgtacggccttgtagatctcgtccacctgcagcggcgaatcccaggtaccataaggtcgagtttctaccatgtttgaaaagagcgagagtgatgtatagttgtgcgttttgtatcagcaggatcttgctacgatcgatatgagccctaggcaggaaagatgcaatgcagctgctagcagcgtggcaggtgaagtatatgtgtaagctataagtacttacacctagcacctagctagctagctaccccactacttcgtgcccccatgtgatccttgaccccgctcgattccgcgcgtctccgagtgttggatgacgcggaaaccgcgagccaggaggagaggaggcatggaaagtgatatgatcccatcccaaaggacacttggacgacatcgataccggccaacgtccacccacttagctagtaaatgtaggtagagtgtgattgatagctagcagctatctcgccagtcctaatacggacactatctatcgtcgtcgctctaggtctttgttcatttgacattggcgacaagggatcctcgaatcacgaacttggtcctcacgctcggattccaagaccctctacagctagaaacggcttactttcacaattcgacttgctaccaatccacttgccggcccgagcttacggactcagactgctctcatctacgacgacagtaattactgcttctcgtctcgatcaatcccgtcatccgcttcgaaccgaggcaatcggagactaaacctccactgctacttgtgactttcgtcaagctgtcttgcttgatttcaatcacgggacaaccggaggagcgatcttcgccctcctagtcaggacagatcaagacgtcttcctctatcacgattccgccgacacctttctcacctgcgacaccccctcataataataacctcatcagctcggacactcggacccccacgagtgattccccctcctcgcaatcacgatcccacaccgccaacccgactttatccgcttcgaactctccatcccaaagcgcatgccgaggcatacggagagctcgatcaccatcttcatcacccacgagatcaaggtctgagattgtcgcccagcaggtcatattttcccccattttgtcttcagagcgaccacgaccgtctaagagagcgagagtcacactagacgatatcgacggcttatcggatcctgcgagcgggaaaatgaccgggtccgcgtccgcacagatgaacgaaatgaatggtaatggcaagtccagctcgccagatgcggctccctccggcctccgggccagtctttcgggaaacgctccgggatctctggcctctcgagtcaggcgggtcgatttacccggtgactacatgtatccgcctgcgactcgagcaccagggtcggtcgctctttctacttcgccacacacgcaagggaacggggatctcgagcacaagggcaaacagagggccgagctcgaaactcgaacgaatgctgccgaaagttcagcggtcgcacgcgagatcggaggttcgaaggggacgcacactccggcaaagagggaggagtttgtcaggttgatgttgcaggctctgagggatgttgggtacaagtcagtatcttctgccatcttcggggctggctctccgctgaaacgagcctgacgcaatcttgtgcccgggctacccagtcaatccgcagaggtgctcgaggccgagtcaggatatgtccaggaaccggctctcgccggatcattccggcaagccatcctcggtggtcgatggtccgaggctattcacttgctcagcgacctgggcgtcgtattacccgaggataaaggttcgcctcgtaggaacagcatgcgacgcaggagtggcgacctcagctctacaagggcaacgaacggaaccgatatccctaagatcgcttcgtcttcactgccggacactctggccatgcccggggggatgccgacgactttcgagtcggtttcgtcgattccggacatcgacatggacagtggcgttcgtgaaccgcctgtagcgactgggagcaatttcaagaagcaagatacacctggaagaagagcaattttcatggtcttacgtcagaaatatctcgaactcatcgaggctgggcagaccgtccgggcgctcaaggtcttacggctagaagttgcccccgctgcggccgatacagctaaactgcacgcactttctgggtaagcagctcgatgcgaatctggcgcgatctcctgactgagccaatcgccttgcgacaagtacaggctaatgatgtgcatgaagaaagccgacctatatgcgaaagccaagtgggatggtgcgacgggtctatctcgacaggagttgctagatgatctgcaaggtgagcagtgctatgcctctaagaaacgcttcaagggatcttgacaaatgtaccgcatagaattcttgccgactggtgtcattatgcccccccgaagactcgcaactctgtttgaccaggctcgaaaatatcaagaaagccactgcgtgtatcacagcgggaccccggcagagacgcttttgagcgaccatcgttgtcagcgggaggtttttcctacggtcgctacccatgttctagcggaacataccgacgaagtatggacgatccagtggagccgcgatggccggtatttggcgagcgctggaaaagacacttctatcatcatttggaaagtggaggtgagcttggggcttgcgagaatgctttgatccattttgaagctcaataattgccgtcctcagcctacccccactcggacctgtgagcaatatatgacgctgcgtgggcattcagaatcggtctctgcgcttgcttggtcaccagacggtacgagactcgtctcagcagccgaatcgaccgttatcctgtgggatatgtctgtcagtcgtcatcaatcgcacgtgacgttgcagtcatcgctgatctgtttcattcattgaaccagatgggcgtacaattggcatatttgccagagactcattcggatacgatcagccaagtacaatggatctcggacgatgctggattcgttacagcagctatggaccagaagatcgttacatgggtaagctatcgaacgaccggcccgctacaaagccgaatcccttacatgcctttcccgtatagacccgagagggaaagctcaagatgacactctctacgggtccactgcggatattcgacttcgtcatttcgaaagatcgtcgtcggatcatagccataaccaatgtcgtgggcggggcaaaccacgcacacttgaggcctacagcctcacgtttgcccgttcccggtgcgagtcctggtcgagcaaatgcgacgcccgcagagaatggcggtgtaccgaattacagcatcggtaaaatggaaagggatatcgtgatatacgatctcgagaacggtagcgtgatagcgtgagtttctagctctgatcgaagttgtctgtcagggatttacataaggctgataacgtcttctatagacgtcgaaatctcggtggcgagatgggaagcatttccttgtcggacgacggaggacaagccctcgtgagcgtggcgcccgatgtgagcgatcatgacggtttagtccttgcccctgtactcaccaaatttcaacgatgatttacaggacttgcaattatggaatgtggaagacggttttggtctggtacgacgatatacaggacatcaccatgcggagtatcagatcaagagttgcttcggcggacgggatcgcagcttcgtgattagcgccagcgaaggttcgtacgcggaggcctatatgatcagaaagtgaaatgcgctgataaaggaatcgtgtgtcttttcagattcccatatttacgtctggcaaaaggatacgggacgactactcgagacgcttcatggccatgcgggcgttatcaacgacgtcgcgtggaacccggtctattccgatctttttgcctcttgtggcgacgatgatacgatgtgagttggagattgcgtgctagatcctttaccgttctcttcttaacaactggttctgggtgttagtcgactctggcagccggcttcggtcgcccagtttatcgcccgggctcgggcgggaccatcgtggactggaggacattcggatgcaccccagctgtcgcctataggcataccttccggcatcgacatggacctcgtattctgattgtatagccgatgtagcatagtttccgatcgcccttcagatcaaccatgaatgtacaatccgtaggggtttccggtcccgtgatcgagcttgaggcttgaggtctatggtttatgagcctgacatctttgactgcactatgcacaacaaacaaaacaatcacaaggccgaggttgatgtcaattgctgatgctgatcacgcttgttgctatcaacaacagcaacagctctacgggatggatagcttgcacgatcccgatcatcggcactactgacttataagtctgtgtacatcgctagcggttcatcttacagcatatagatccgactgtaaatttcggctgttgggacctgaaagccaggacaggttcgccaacgcccacgaaaccttctcccgtcgatacaacccagctatcaaggccgaccagttctaaggctcaatcacaaagcgtgtcatcactctattatggtgagtcaagactgtatccccttcgattgtttcacaagttcaagctttgagtctgacgttatggtcgggctcagtcgcttggtctaggtcgtccgtcatcgacttcggtcaatcacacgcatctttcgccaggggcaccagcgcggacgaagagcggcagacatcctcgagaggctagcggcggggtattccagttgttcaatccacaacagtaagcgagcgatcatatggatggctgctatgttccgtaatacaagctcagagacttgtgctgtcaggatcaagcagttcaaagaagccttctccctcatcgatgttgacggtgatggtcagatcaccgaggaagacttgagagtgaccatgggaaatctaggtcagctcgttccaagacgattgaccttcccgggaagctgaccaagctcctcaaaataggacaaaccccttcgacggcgcttctccaaaccctattgacccctccttcgggatcgacttctgctggatctcaatccaggtccatcaactttgcgcagttccttactctgttcggtcagaagctgctggaactggataccgagcaggagatattggatgctttcgcttgcttcgacgaggatgacgatggcttgatcgacgtcccccgcagcaaggctaggacgtcggggcaagaagacggacttgacagagttggagaacctgctggactacgaggctggttgaaggagtacggcgatcgcatgacggacaaggaagtaggtaggagtgatcttaccatccagagggctttgatcgctgaccagcgtgcattgctcagatcgatcgtcttctcgtgggaccctattcggacaagcagcagcgcttcgattatgtcaagttcgccaaggctttgaaagtcaacgactctgaagatgtagagagactggagaaagagaagagcagcgcggagtaaggtgtagagcgccagacgtgacgtgcaagcgtgtaaacagaatcgcagattgtacatcagttgtgtagcatataccctgtatctatcgacgcaaggcagcacagacccgagtaatcacattgctggtgcgtaaagcgttttggcattgcggtcgtcgaaagacccgaggtatgtgtagacgcaggctaccgctcccttgatccccgtaaattacaagtcacgcattacgcgagtagcggcgagtcgatctccatcgaagtgactgatctactgaagggtatggcagaacccgaccctcatctctgatcgcatcattccctccatccttgccatctcacgaacaataactttccggtgtagaaaagtctcgtattagctaccttcgaacttcgaaagccttacctgggtgcggttcggatgacggaaaggaccctctggaaacccccaagaatcggtcgctaaaccacggtcaccagcctttgactcgccaagaatcatcaagactgaacaattggccgggaagtctgcgagtattagcatggatgaacctaacgctggtaaagcagggataccgatcgtagttggtattcttgtcggtctgctggcatctttcgtgcagtcgttgggtaagcccgcatgaccatctagagatcggttatgggggttgacatgcactgtatccgcagggctgacgatacagagaaaaagtcacattcaaaacgatttcttgcctctgtcaaagcagaagaagacctaccgtcgtccgtgagtgctcggtcagaagcgcatgccatggccccttttcataacagcttgccatttgtgtcagactatggcttcttggattcggtgagaaaacgtgctcgtccgcctcaaacgtcaggctgaccatatacaacactgcagctgtattcattacgtcgaatctcttcggcacgatattccagatcggggcgctcccaatcgtcgtgcttgccccgctcggagccgtgagtctgacctgatacataccttcaaccacggtcgcttacgagtgctctgtttcaacaggtttcacttctttggaatgcggtcctctctcgtcttctgctccgggaacgtttctcaatgcgcactctcgctggaacttgcctgatcgccatgggggccagcttgatcgccatctttggcgtggttcccgaggagaatcatacgcttgaagagctgatggatttgtttcgacgaaagggattcgtggtgtacattatcctgatgagtgtggctgtagtcggtattcttgctgtcgtgagttcgtggcatatgtataacaggtcaggctcgttcgactaatgctactattccgacagagccatctggtggagttcggattataccggagaaatcagacgggcgctatcaggctgcccgatgacgtccgagatacccctgagccatctgacaatggtagcatcgaccaaaggcaacagtcgatacctttcagggacactacaacgcctagacaaatgctgaattccatagaggctccatctgcccctggtaccccctcgacgccggtgacgaggagcgccatgcgaaaacgacccgtcgacggtgagcctagcaagccgcctcagccccccaaaaaggtccgctacaaagatttgagtgttaccgacgatggaaacggcggggattcacaacgtacgagccttgatggaaggtccaaaaccttgttgggtctttccttcgccgcttgctccggaaccctgtcggggatgtcgctgctcttcgccaaatgcgcggtcgagctattgatcctgactttcgcctctaaggggaagcagaaccaattcaaatcggttcaaagctggatcctactagttgggctgggtatcacggcgctcgcacaactatactacctcaactactcactgagactagcgggtccggccataatatgcccgctagcgttctgcttttacaacatttcgagcattttcggtgagtcgagctgatctggtcagattgttagccaatttccgagtactgataatcacgttgatcagacggactcgtcttctattcgcaattctcggagttggcgcctcaccaagtagctctcgtgactatcggcattgctgtcctcctcgtcggcgtctggtcagtctcagcaatccgacctgacactggcgaaggaggtgttcaactaggatcatgggcggacgaggcagattcgtctgacgaagaggaggacaattcccccttatggagtgaatctttcaccgatgaacccgctcaagaatctccagaacaacatcacgacggtagcgcactcgctcttcaggctgatgcagcatgtaccccatctctttcacctgtcacttcgccgagacgccgacgctcttccggctatcaagctagatacggaactttgattccggaattggctcctccaggactaccggctggattctcaatcggattcaatacgtcctcacctggctttgctctcagacggcatcacaatcatgagcatgctagctcggacggagaggccttgggaaggcagatacgaagccatagcgaatcgagaacggggaagcgcgcatcatcattggacggcagagctgcatctcttgaagtgcctctggccttcagtcttacgcacgatgcagactcttcgcttgatgtcgctgcgcggaccactacacggagcgatgatccaggcggagacgtgcccaatccgaagccgcgtacctgagccgggtcgcatatgggctttctatcaaattaacgggcattaggaccaatcgctgtggaacatagttgtactgcatatacaagagactgaatgcctccatgatgccaggcatgccaggaatatcatagaaaccagagatctcaagattcatgccgcgtcggtactcggtcattgaccactcgttcggccgaaaagtggaggtcactactgtactactgttcgacgcgttgatagcttgctagattcatggctgattatttgtggagggtcattacctctcctaagttgcaagtcgttgactaacttgatcgcttgatcaccgttctgaaaatccgacgctatttcgtatcttgtcattagtccattgtctcgacaacttctggcatacaggacatcgctcctggcactggttcatcgtaccgaacaacggcaacgactcctttggcaccatgtccgctccaaaagatcagcaagagctgttcgacttgtgtaggtccatttgagctacccgggcgcgcagagtgcagacctctcttccagattagcagcttgcatctcgggtgcagcaatgcgaaatattgattattgagctgaactttgacatcctgtcatcagccaagcctcgcttcgacctgaatacctacgctggacgtgttgccaatttttactcaacgacctcgcccctcacactgttctattccaatgaaagcttgaaagaagcacaaaagaccgttagcaaatacgacgagaagatcaaagaggccgggaggaagggatatttcgtgaatgcagagcagaaggcccagtacgatcatgcaaaacaacgtaagtgtacttgtgtgagccggaggtgttgcgcacgagctgattctagatatgattgtactagtcgtcgattcgtcgatccatcccgatactaatgagcctgtggcggttcctttccgaatgtctgccttcgtcccgacgaatctgctcatctgcgtgagcagactatattcacaagcgcgatctgactcaagcgtacttatcgtgccatcattcgtcaggcaggaatgcttatgccaaacccgtctctgatttccatcattggttggcaatgggcgaaccaaacgttgaacgtagcggtgaatttcagcaatgctaacaagagtatcaaaatgtcaaatcaggagatcggtacaggtgaggaatacgtttggaatcgtcggcgaaagctcgttaacatcgacaatgattgttaagcatacatggctgcaaccgcgacttctgtgggactcgccgtgggattgactcgagccgtaccccggctacctgtatcagcgggtgcaaagattgtgctctcgaaactagtgccgtttgcatctgttgcatcggccggagtcgtcaatatttcttgcatcaggtggaaggagatgcgggatgggattgaagtcttccgcctgaaaagagacgcgcaaggaaacgaggagaaggaggtcttgggcaaaagcgcaaaggctggacagctagcggtcgggcagagtgccgctagtcgaattttgacgaacattccgacgctctgcatccctccgatcgtgatgaccattctggagaaaagggggactttcgtgggacctaggggaaagttactcggtaccgctacacaactgaccttgagtgagtgctccgttgcgtctatggtgccaagaactagatctgaactttcctatctgtgatagttggactatctttggggctgttccttcccccatcaatcgcctacttcccccaacgtgcttcgctgacccctgaatcactcgaagaacaatttcatgaataccgcggcgaatctctatacgctaacaaggggctgtaacgtaacgaggctattattcatgacaaaatacgctgcagcggtgctcttatagtactcataagccaggccaaatgttaaactcttccagatggcaaggcgattacacggtcaaacgtcgtgatacaaacatgaagatttattgcaataagcgtcggaagtcgacattgcaaacagtccctagttcctttgcgaatcattaagctgcagggtctatgagtcagctttcgaaacattgtcaactggaacaatagaatgcagactcacaactcggaggatgtagagaaacaggttaatgaaatcgaggtacagcgagagagctccgaagatatactcgtccggcgacaatcgtttcatgatgttgtacctgcgggatatttgatcgcttcaatgccttttctggaatcactggtgcgcaagcctactcacgtgtcgaagacaacgtatccgctgaatatcaagacaccgaaaccggcaacgataagatcggccgtttgcgagaacggcaggaagaactggataagtccgactccgatcaaaccccaaagaccggctgaaagcatgggtcccatcgaggagaaatcgtactgcgcggcaagaagggggaaggtttagttccagtcaggctcaacatttgcctggcgcagccacttactttgctctggaaggtaaagagagtcaaaccgacgaagacgcctgaggtaagaatcaaagcttgaaggacaatcctgctctccatgtagctggtgaccattccgataaggaaactctcgcacaccgtaaacgcccccaagaggatcatgttggacgggtacacgtgtcgcctgtaggagactccaaagagcgtcaagaaggttccgaccatcgggatgaacatcaggtagggactgaaaggagataaaacgggttagtcatacttatccggggactgtgaggaccgaacccatgtggcttacgtcttgtgcataatctccgtggcggtcttcgagaggtggaggaatgcggagatcgccgtagtggcgattagctgtacaagcagaatcctgagttcggaaaggagaccaatgagccaggtgtttgctgatacaatgttctcatagcaggtcactgcaggatgcttacgagtaaactttgcggatgaacgccatcctgatgaccatttcacactcgtctacattcctctcgtcctttgtgtcatatccgtctccgaaagcctccaggtcatcacccgagtccatccaagcatcccgtccagaaccactggccaacattcctcgctgtgctccaagaaggggctcagcagctgaagtaggggagctcgttgcaccgtaggtcttcttagtggccgagggaggcgcattgtcggagtaagccggaggggcgatgttcgggttggccatgatagcgaaagattgatgtaattcctttgactcgggttttagagcgtgaaagccgaaatctgaagtagaacaggaatcaatacagacttgaataggtgtttgtgatcgatcagactggcagaccggaggcgaactggatgatgatatcactccctcaattcatgagacccaccgcctccctttccccgaaggccgcgtcaagtctcaggtctgctaccgggaaccggccagattgttcgacttgattctactcgacttatccacctcacaatccgaaaccgagacgctaggtcatagaaggccccgtcctatatcacactagatcacgtcttgttatgtccggacctcctgacgctcctcctggcttcacgcgccccgttgtctttttcgatgtgcagatcggtgagagcaagctgccgcgagtcaagatggaattgttctcggacattgtcccgaagtgagcaggattcaagctttcccgaaatccaggttggggatctctagctaagcatctacttgccttcgttgctaacagaactgcagaaaactttagacagctatgcacaggagagtttaggtgagctcgaggcgcctatctgttagccagacaacacctagttgacctttcaaccacgagataggcacaatggagtgccgcaaggatacaagggagcaacctttcacaggtgagccagctgaaaaagtttgcatactgcgggctatttaatcaacgtggattgcctcacagagtggttccatcattcgtcatccagggaggagatttcgtaaacggagatggatcgggaaccttctcgatttatgggggcaagttcgctgtgagtatggtttcctggatcttcgtcttcctcggctgcggtcctgagttagattctgccacgacaggatgagaactttacggtcaagcactctcagccgggcttgttgagcatggcgaacagcggcaaagataccaacggatgtcaggttcgtacgagattgatctgctaccaggcgtgtagggctgatccgagaacgtacacgaacagttcttcatcaccactacggaaacatctttcctcgatggcaagcacgtcgtgttcggccgaatagtgccagacggtcagagcatgttgagtgtgcgcaaggtcgaagcggtcccgaccggtgtcaacgacaggccgaagctaagagtacagatcgtggagtgtggagagatgtaatgcggcatagaatttctctccttttgtcatgttgcccgacatgcatgtatccagtaccatgagattttgaaactgatcgcagtatcttgcggagtaacatgctgctacccggcggcgtaatgtgattgacagatgtcatccgaggacccgtcgggaccgaaaggtctatccgtctttatcatgagctgtgctcggcagcatgtcaacgcgcccgttgcgacctgcatggatgatgctcaatgatgttgtcgtcatattgagcatttgtatcagagggcgagattcagtttgaccgcctcaacagcccgctggctgcacccaatggtacaatcacgcaagtcataatgtcgtaattactcttcctcttcctcaacatcctcgttacctgcatatcctgcgagacggccaatctaagatggagcgagagtcagtcgaaggaaaacacagcaaagccagtcgtagcgcacgaaccgtggtcttctcaaaggcttccaaggtgacctgagccaagaagccgggtatgctttgcctctgcagtacccaatactccttgacgtgctctaggttcttccccataccccccatcatcttcatggtgccgaaatgccctccttcgctcttgaagacgagacggagacccatcttgccgctctttgctgcgtacatggattccagtcgtacatccgagccattttccccgaaccggaccctccagcccagcagcgactggacggattcaagaaattctttcgaccgagcagcaaaggcctgcaaggaactcggctcagtctcttccgcaagacctctacacatcatcgactcacctcgcgcaatcggaggagccgcttttcgtgtagtgccttctctgtctcttgctcttccctgagccgctcaaagacctcgaccggcactgtcttttcggaactatcggatgatgacgctccggcacgttgcatgtcagtgactttggcgatcaaggcttcgttttcttgttttagcttttcgagagtttcctttctgatggcgtagtccctggcagccggatttccgcctagttcgattgctcgccagaccttggtattatattcgcccgatcctagccgagcctccatatcctcggctgctttgcgtacttctgcgtagcgttcctcatgttgtgtgatggattgcttgagattctccagatctacaatgtcgtggcatgccggatcagaccaggctagtcatcaacagaattcaagcgatagacatatctcaccttgctccaaagttttgcagcgctccagcgcgaggttcagatcagctcgtttcactaggtctaggtccaagatggctttggcctggttgtcacgattatcctcctggaaatcgtcgatagctctcctgtacagctcgacttgtcgacgtagctcctctgtctcgccggcatttcccgcagaagatgggatctctgtcctgtttgaggcggagtgctaaaaacccatgtctcctcagtacgacgttctggtgggtagattgttaggctagatccggctcacagtgctcgagcgcaagacttccagttcttcccgagccaaccgtaaccgtttttcggcgctctgtctgccctcgttcgcccatctcaactccctctcagccgtctcggatcgtttctgtagctcatccattgtcatagcggtctctcggctaatgtgttccaggcggttggagtagtctaggatcgtactctgcttggcagctatcgtctgcccacaaagcgagtgagctgcagccaactgggacaagcgatgttgaagggagaggtattccatgcttgaggtattcgtgtggtcttcagacatgttgccagcgggtaagggtacgctgatcgtgagcatactggagatcaaggcgggatttagtcgattgactggcgctactgcgtttcaaccatattggaacctactccatgtccttgcgggctcgatcgagcgcatcctgacagactgccaatttgttctccgccatcctggctttcttgcctaacgctttgacctcgttgtttagcatctccacgttatcccgcctcaacctgagctcggtattctctttctggagcgcctggttgttcttgccgagtgcgttgagtatggacgcctgccttttcaactctgcttttagatccgtttccgcaccgctagaaggagtactaccgcttgccgatggtgaatttgggcgaacgttggaccgctcgcgttctgccgtcaggatggttcggacgtcctccaattcccgctctttcctctcgagggtctcactcagcgagtgagcttgttgacgcatatgaacgagactatctcgctcctccttcaagcgatcgatttggtgttgtagcagctccttctccgatcgggattgactgacagtctgggcatgagtcctcccgaaacctgctagctcatcgcgaagagagatgttctggtcctcgagctgccgcctctttgtattgtatctctccaacgccttgctcgcttgcgcctatacgtcagaattcagcaagttgtcgagaaaccgagatggcgttgaggcaacacaccttttcagcctccaagtcctgtcttgcctgatctctggcggatattgctgattcatatccccgattcaggttcctacggtcttgtacgagcttttcagtctctcgccgattggcatccagctcctcatccctcctctttagtttctcttcgagagcgaatatcttggcttcaagcgatgtgttcccgatctgcgccttgattagagatctacgtaggggatgagcaggcgagcctaaggatagaagacgtatcactcagcctgtagtatatgttcatgtcccacatggtagactcactttccggcagttgtgcactttccgcgttacgtttacgggagggcgtccttcctgcctcaagccgagatgaggaagctgtggcattaccgcccgagccgaataagtcgtcctcgtcatcgtccctacttgtagcgaccgaaaacacttcagacattccaaatagactaccttgaatggtcgttcgatcagaatcacgtatcaattatgataacaagttgttacttattctgtccgatatgttatggcgacctgatatctcgtatcctcctcggtgatgttaccgctcgctggtcaagcctggtcgcacggacattcaaaatacatcaacgctcggataaccgatgtccgctttcgatcgcgctcaaaacgattccgagaatacatccgggcagaatttgtcgccccgacgcaaacttcagaagagacgctcggtgttgccttcgaccttctgcctctacgattttgtcctttcgtacagatatcggtctgcagagatcgattgccagctatcgaatactcgtataatgcctggcataagtaacgatacaattatgatcgaccccgacgtcgacatggatctgagcgcccccatcaccaccgctcaaacggcaggaggcatagagaccttcccccttagtaatcggattcgcgcattcttgaccgacctcaatgtcgccgaaaaggactcaagcaagcggcctgaattcctctctgagcaagcttactgtatattacgaacttgggctttcgagccttcccaggcggtacccacaagagatgtcctggacgtcatctcgcaagtcgcatctacgcctgggtgcgcatatctggtcgtcaagcatttcaggcctcttctagtagatgtctttgcgcgatggcttctccagaacgataccgaaactaagagccaggagaggtgggaaacggagctctttgtgttggccgaggtggccgagttcgtaccagagctgtggaagtaagtcgagagctccgtgttccactcagctcgaaaggcgctaacacggcacatctggaacaacagcaccgtcaacacattccttgtacagtctcccttcgcgaaacatacccctctggcattcctgggcaaggacgattcgatactggctatccccccaactcgcctacaccttctcttgctctcacactatagactgctgacggccgacccacgactttgcctacgaaaccaatggaccaagattcctcttcgactcctttttacccgccatcctgatcaaggcgtacgatatcttgctgttcaatgttacatacaacaggtcgggttgccggaaaaggaccgactcgagctggaagaccgatgggtcgggatccagacggaagagccctccgcgtatatcacgtatggatgggagtacgcaccggaagaagagaccgagtcagcagggaagatggagttgcagacctttgaaggctggggactgcggacacgagaagcggttagggaacggctttacggaaagctcggacgggacagtctggaatgggtgtcagaggggaatgtagtcgtgacggaatccgacctttctccgttcaccgccattatcggcggtcgaatgaccctgcgagctcagctccctgtccggacgcatcgaccaaaggagcattccttgcacgtggatattgagtcgaatcaagaggcattgcgattgatggttagcttgttggaccggagattacccatcctccttactggaatggcttcttctggaaagtcacatttgctgcaatatctctcgatgatggtctatcccgcgacaccggtgaactcaaggatactgaccatctctctggctgacacctcgattgacgcgaaggcactactggggagctacgtctcgtcacccacggagccgggtacctttacctgggtagaaggcgcccttacgaaagctgtcaggggcggaaggtggatcgtgctcgaagatatcgatcgggccggacaagaagttttgagtttgttcgcccggctggccgacagcttgggagttgccaaagttgtcggcggacgagcaatcttggatatccctggtcgaaatggcatcgaagcgggcgatggttttgcccttttcgctactcgcaaggtcatcaacacgttggatcacgcaatacccgccactttcctcgggcacaattacttcgtcgaggtcgcactcccgccgcctactgaggtcgaggttcagaggattatggatgtcaaatatccgaaactagccggaccacccgtccaggctttgtcggtggcgtaccagaagatcaaacagattgagcaaaaattcgctagatcagctctgcccggcagtggggctcgtcggaattacgggctcagagatctcgagaagtggtgcgcacgagtcgcaacttgtctacccatcacgggcgaaatcgccatgcatgtcgatccttccgcagatgtcatgaggttctccaacccctccgtccaagatgaagtgtttctcgagggtgtcgacatcttcctcggctcttttccataccagctggtagctcaggccgagaggcgacaagctatcgctcgaatcctgggcgaggctctaggtctgggccaggagcggtcagattggctgttggataagcgcgtaccacaggttgagattcaaggagattcccgtgcgaggcaaagttccatggtccgcgtgggcagagcttcgctgcatggtcttgcgccccgaccgcacgaccctgatgcgcgacctgctaggccttatgccatgacgaagccttccgctatcttgctggagcgcattgccgtcggcatcacgttggcagagccgatgctgctcgtcggagagactggaacagggaagaccaccgccgtgcagcatgtcgcttcattgctgaatcgacctttgacggtaatcaacttgtccacgcagactgaatcagccgacttgcttggaggattccgccctgtagatgccgccgttcctgctcgacacttacacgccaagtggttggacctattcaggcgaagcttcagccggaagaagaacgagaaatacgaggacgagttgcgcagagcgattgtgggttccagatggaagcgggtcgccgaaatgtggatcggagcggggaagcttgccaaagaccgcacacggaaacgtttagcaaggtgagctgacgaacaaggctatgcctcagctaaacggcattgactagaacgatagggctgaaccttgcgcgtcttcttaaagtaaatccgccgaacctttcgcttctgacaatcttgtcgaggcagagcagagcggttcacgtaagcggcgaaaagtcgccgacgacgagctcacggcagcagagttgcaagacatgctttaccagtgggacacgctgcttgttgagatcgagacattcgagctacaacatgtcaaagctgggggaaagcttgttttcgctttcgtggagggtccactggttcaggctctgaggtgtggtgaatggtgaatccggaagtcgtcgcgtttcttgaccgtccgtcatgttgatctcatattctcatcgcaggatcttacttgacgaagtcaatttggcaagccaggaaacccttgaatcgttgtctgcaatcgtcgaaaacgccgacgcttcggtggtcctcacggagcggggggacttggagcccatagagcggcatccggatttccggctattcgcctgcatgaaccctgccaccgatgtcggcaagaaggatctgccccccggattgcgcatgcgcttctccgaaatttactcgcctccgccggacgatgacagtgaagctctgattgccatcgtgaaacaatacctcggcgatgccgtcgccggagaccgatcagcgatccttgatgtggcggagttctatatggccatgaaaactctgtcgcgagctcgggaaatcgttgatggaaccaacacgccaccacacttcagtatgcggaccctcgcccgggcactcacgtttgctgtagatgtggctcccacattcggcttacgccgtggactctacgaggggtgccttatgactttcaccatgtcactgaatggtcctagcatggagatcgcgcgtatactatgcacgaagcatctgctgaatgggcttcgaaacccgaaagctgtcttgagacaacagcccagtgtcccggccggcctagaccaggacgactttgtccgtttcgggcaccattggttgacccgaggaccggaggctatcgtctctgaccaggcatatgtcatcacgccatctgtccaacgcaagcttagcgatctcgctagaatcattctgacaggcaaatatccggtgctcatccaggggccaacatcggcaggaaaaactagtgcggtcgagtacctcgctaagcaaactgggcatcggttcattcgaatcaacaatcatgaacatacggatattcaagaataccttggcacgtacgcttccgaccccgcgacagggaaactagctttccgagagggactactggtcacggctgtccgaagaggagattggctcgtgcttgacgaattgaacctggcaccaacagacgttctggaggcattgaaccgactgctggacgacaatcgcgagctagtgattcctgagactggagaagtcattcgaccgcatccccattttatgctgtttgccactcagaatccgccgggtctctacgctggccgaaaggtcttatctagggctttccgaaatcgattcctcgaggtgcacttcgaggatgtccctcaggatgaacttcaaactattctatgccaacgctgtgctatcgccccatcctatgcgcagaaaatcgttcaggtcttccaggaattgcagcatttccgccaagctactcgtatgttcgagtcgagagactcttatgcaactttgcgggacctgtttcgatgggccaatcgggacgtatcgagctatcaacagttagccgagaacggttacatgcttttggcagagcgcgcaaggaaagaagaggacaggaccgttgtcaagcaagtcctcgaatcgaccatgaaagtttcgctcgatacagctttgctttacacggtgaccttggataccactagcgcctttggtcggcttgggttgcctttacctcaaacccagtcgaaacgagtggtttggaccgctgccatgcaaaggctcttcaccttggtcgcttctgccgccaaatatgatgaaccggttcttctcatcggtgagactggcgcgggaaagacatctgtttgcgaagtcttggccgatgttttaggacgccagatgttttcgatcagttgtcatcaaaacatggaaacggcggacatgcttggaagtcagaggccgatccgcgaccgctcagctcgtctccttgccgcgtaccttcgcatagaagctttcgcttctgcagtccacggcgacagcttggaacaacccgaaagtctttctgctgctcacgtgcaaactctcgtcgaagcatacgagaagcgagcccaatcggcagctgagatggagcagctacgaaaaatccggctggaagcgagtcaatgtgaagccctctttgagtggcacgatggaccgctcgttcatgccatgcaagagggcggtatactcctgcttgacgaattatctcttgcggatgactccgtcctcgaaaggttgaactcggttctggaaccctcaaagacgctcgtgctagccgaaaagggcggttccgacgctgacgtcgttaagggtagctcgggatttcagatagtggcgactatgaatcccggcggggattttgggaagaaggaattatcgccagccttgcgcaaccgattcaccgagatatgggtacctgctatcacagactacaacgatctgtttcagatcatggatcaaacctggtcggccgacatcctgaagcaatgcagttcgcctgtcatcgcctttttcagatggctcaacgataaggtcctggagcacgctcagtccgggattggattgcgtgatttattggtcagttccgtttctgtcatactaagcggctatctgcgaagactgattcagaacttgcattgcaggcctggatcactttctctaaccattgttggaacaaactcgagatgactgtggacgaaatctttgttagtggaagtgaatgttttgcttgcagcgatagacttatatcagcgcattcacggaacaggaacacgccgctcgattaatcctgatcgacgggctggagttgctgccgggtttggccggtctcagcaaggagcgtatcaatctgattcgggaagattgcctggcgaaagtccgcgaacttgtcgcgccctttcagcgggatggagaccgccgttcacctgactctcacgtctacgacgtgcgctccaccgagacagccttcgggatcggacccttcgtcctgccaaaaggacctgtgccaaacgactctgactcgctacccttcgccatgcaggcaccaaccacgatggacaatctgcttcgcgtactacgagcgtgtcaactaccgaagtcgatcttgttggagggtagtcccggagttggcaaaactaccttggtgcaagctttggcggatgcttcgggaaggtcgctttgcagaatcaacctttcagaacagacggatctcatcgacctgtttggatcggatctaccggtcgccggtggacaagcaggggaatttgcctggcaggacgctgcattcttgacagcgatgaagaatggacattgggtccttcttgacgagatgaatttggcatctcaagccatcttggaaggtctgaacgccgtattggatcaccgtggtagcgtcttcattcccgagctaggcaggacgtttcagaagcaccccgatttccggatattcgcggctcagaatcctgttcagcagggaggcgggagaaagggactgcccaagtcattcctgaacaggtttactaaagtctatgttcaagaacacgagcgttccgacctgcaaatcatctgccgacacttatatcctggcttatcagcgactgtcatcgatgacgtgatcgagttcagctcccggctgcaagcctgcgtcatgcgagaccgagcctttggatacgacggaagtccctgggaattcaatttgcgtgacattatgcgctgtttccgattgatgttggcaccgactggtctggaggtcgcttcctcactcgaggatgctctcacgatcgtctacgtccgaagattccgtacaaagacggaccagaacgccgtctcccagctcctcaggaacattatgcaaacgtccatcaatcatgatacacagccttggccgcggatcaccgctcaagacttcactgtcggccatgcaaggttgcagagacgatcgacacccatgtggcctgccagaaacctggcgacaagccatcaaacgcttcagccccaagaagcgcttctgcgctccgtctctgcgggatggctgacaatactcgtcggatcttctggtaccggcaaaagaagtcttgtcaggcagacggctgagattgctggtactccgttggcggaatactctatgcatcctgcagtggacaccatggagatgctaggcagcttcgagcagactgatcgcaaccgtcatctgggagaactctttgcccacatcttgagcaggctcgaatcggccgagcagcatggccagatcgatcaggtgattcacgaaaacgctatccatgttcttgaggagttcattcgtgctccaaccaatgttgaactgcaacaagtagttgcggctgctaggcagctgttgcaggctttcgcagatcgtttgggcaatcaaattggacagtctatcgagcaaaaaatggacgtcctgttgaacagctcggctacttcctccttcgagtggatcgacggcccccttgttaaagcaatcaaaacgggtggctggtacctgattaatgacgccaatctctgcagctcttcagtcttggacaggctgaatagcttgtgcgagttgaatggtacgctgattcttagcgaaagaggcaactcgcaagatggagttgaactcatcaagccccaccctgagttccgtctcttcatggcttttgatccccgcaacggagatctttcgagagctatgcgaaaccgagggatcgaaatcggtttcacagacggtgccatcaagcctgcaggtctttctgaagtcaggcatcttggcaatacttacacccgagtcgcccatcttgaagctgtgtctgtttgtgagattctccaagaagatggtcttcaggaacgggaccggacgaaggctgctctgcttggccaggtcttcgcgtctcaaccaggtgcactgatggctcgactccttgccgttctgcgggtgcttgtgccgcttcgacccgatgtcgagaactcgatctggcaggccgtccaggaagtatctcgcttgggtaccgaaagtcaggcggtattcttgcaacagcaggagcacttatcgaaggcattcatggagactttggtgagctgccttgtgggattcgctagagctgttgtagaatcgctactgagacgcttccaagtgtatagccaatcggactgtctacctttccaccaatgcatcgcttagacccccatcgcatcatcacgcgaatcatcagcatgatcgcgggaaacgcgctcactgacgtatcgctcgacctgggtacagacggcctggaaggtcaagttgcgacatttttgagagccgcacgtgaggagatcgcgcttgcgacctcgacgattctcagcgaaagtgtcgaagccgcgtctgtgagtgacatgaaatgatcaagctcgaacagcgctaacggctaactttggacgtaataggacaagttggaaggctatctccttctgcaggatctggcggacattttgtcagagtcgctgttagcatcggaagtcacagatatcgctcttgtgcactcgctactcaacgagttgatgaaggggtatgctgtgccatctacgaaccgcgtattagcccgtagcttggaggcactgaggcgtcgagccaatccctctattggtcttgctcaaaacgctttgtggagggcggcgcggcgaccgatgcactttgacgaggccaactcagttgtcatcgacacgctatcgaaacatgttcagtgtacgttccgcctcattgaaaaactatcgttcgcaatgagctcactgcgcattaattcatagtgtggaagaccttgggggaccgcaccattgaagcagtctctgccagtttgtttgagcaacaacagaccgacgatgccgttgcaaagattctcgacgcatggcggaatgtgagtgcctccttgcaccgggaaagcttcattgcacacacttagctgaaaatgactttgtagcttcctgagtcccgcggagcacatgcttctctacgaatcaagaagcagctcatttccatgagttgggctatgttccgaaatctgctctacaaacccaatcgggtccaggtgtgttcttccgtcaaacggcttaatcttctcttagctaaccgacccgcgattccaacagcccgagactttcagcgcctttaccgaactgcttgctgaatcagacgacttgcgtactgtaccactcttgagcttcgcttacatcaaggctaacaatgtcctccagtcacaaagtacgtcgccgctcatatcgtcattcgatctgcaatctatcgctgaatcgtctatttgcgcagtcctggacaacaaagcgatttggatagccattgagcacgcgatatctgctttgtggtcctctacagaagttgactccaaggtaagccatcccttgttctaagccacagagcggttcgtgactgagaaatgatcattccttagggagcgagcgaattgaatcttctcgagccgataaatctccagaatgccttatcactcaggtgagtagctggtcaagtcaatttggatatgtcactgctaatccgacattatgcgaaacaggatgaccaaacagctccgcctaggcgacgtgcagacgaacaaggatgacttggagaaagctacgaaattgctagccattcaattaatgagcggttctccagacgtctctaaacatagtttggatcttgccatcttcttgttgttcaaagtaagctctccgtgaccggacgtcttcgtcgctcgttatggagactcaatgcctccaatttagatcatcaccggttccagcgacaatgcggacatcagcgtctggtctcaggcggaattggatgtcatccttgatcataaacagccttcaacgattcgactggaacttctacgaggaattgcagcgcgcaacacaaatccagccgtcggacatgtcttcacggaatatttccgtgtctcggatgtcgacggtccaagatcggaggaaagagagcgtcaacccggcaacatttggcttcgtaccgctctgaccctgttggatctctacgttcccgatgtcccattggacccgtctgtcgagcagtactgcagggtcaagcttcgtggctgccgggcgagtagactcgcatcggaggcggaagtagtggaacacgcggagagagctcggactggagtgtgcgaaagccctgtgctggagagaatccgcgaagaacttcgagccttaccagatgtcgctgaatctgagtccgaggctgcacagtatcgggagagagcgatgcagctctcggcattctatcaagagactcatcgcttcttcgcgacggtccatcgatcgagcaaccttttaacgctggaggcagcaattttggagggtcgaactcacgctctacaggaggaagagaattatcaatcggcttctcaagcttatttgaacagattgaaggagtcttatggaactcttcaggacctgataggcccaatcacagttggcatcagagctgccaaacttggactttacctcttagcaaggacttcgaaggcggaatcgctccaagcgcagcacaagaacgccattcggaccgtcaattatcttttaccgttcccgatcgtgaatgtcgcggaaccgcttattgacctgcagaacacgatgggagcggatatttcgattcggtccggaaaccaggctctgttggcgatcgagctctgtgccgtcctgaaatcagctggatgccgtctcgatatcattggccctcgaattggccgtgcctaccagaccatggtcgccctctggatagccgatcagaatgccaaccggagagctgaacaggtagaggagagcctgtatcgggaacggaaagttcagtacgaagacctccctgatgccgaacgagaggcgcgcgagcttctggcgatgttcccccagtacgaagactgggaagaggaggaagtcgagtcggatgcgcgcgccaacgccagtccgagcgcagctcccacattactctcacatgacaacgtcgtcagactatatcgcctgcatcttcaaatattccaggatgaggtccacctctctcaagctttcgagtcggcaaggatcgaccatgtggcgcgattgatcggggagaatgccgaagctttcactgctgaagctgacagcgacagcgtcacggcccagatcaccataatagcccaacgccaagctgatgacaacactaccgtcaactcgaagacgtacaacttttacaattctcccaacttgccggagattttcaaggtgctagacttgttagatcgattggaagctcgcatcaagatcacattggaagagtacccggaccagatggtcctgcaacatctgctcgatcgctgcgccaatattcgttcgatcggtgcagccacccctgtagctcgtatgttatcagcgatcgagcagcttttgacccacacggaagattggcaagcgtatgccaataaggagaactcactcaaggccttccaagaggagataattcatttgatcatatcttggagacgcctcgaactagccggctggactcaccttttggaccaggaagctgcatcttatgaactggacactgctgaatggtggttcagactgttccaactactgattgtaggtgctttaggatcggattccacgtttacgagcgccggcgcgagcgatccggaccacatatctcgggctctacccttgatcatggactacctctccagcagcacaatcggccgtttcagctctagactcaggctcttgaagtctttcacagctttgatacaaaaatcaccggatttgaaaagccgtgactctatgcagaggactgtgttgtctttaaaagggatcatcagaaggtttgggcttttcgagtcgaaggttgaagagtcgatcaatcaacgacgacaacctttggacaaggcgatcgccgattttgttaaactcgccacctggaaagacatcaacatcgagtcgatgcgagcgagtgctcggaaaacgcacgcccagctgtacaagagcattcgcgcctttcgggacgttctcaaacaacccgtcgcgaccgtgctacagatgggtccgcccgccatcaatgaaacgcaaccagatgaggcgttcttcgactcggttgtcaccggcaccgatgtgcccttggatcggctgggtcgaccgaacttgacgatcgctgtcccggatcacctcatcgagttggacaagacttacaaaaagtttgcactggtcatgtctcgagagaatggaccaggcctagacggtagttttgctgatctggacgatctcgtgtccgaaatacaagagaacgtcaaggcactacaagaagagaccccgagcaccctgaccgaggagaacaagaagagcgtaggaaatctgcaggcaagaaagcgcaaggcatttgcagatctgctcaaggccttgcgtggtcttggcttctcagccaagaaccgggcagaccagatggcgcgacagtcctctgtgtcatggcttagcgcactgcctgggttgctcaacgattctcctgcttgtcaacctgaagtcaaggatctattgcgaagcgcagaaacctaccaccagtctcttgacatccttcttcctgccatgcgcgaatcattgcgtggtcacagcgaagacttcgttacgcaggatctgcagcgagctcacggatttgcggacaacatcttcgctacatcgttgaaacaccgtcacaggtaagtacaggctcacgcgatacctcgaggcggcataatgctgacatagacaactttcaatagcttgtacgagacatcgaagcgtgtatcgctgcttgagaccttgttggcaaggcttgacgtcttggcaggtaatcctgtcgtgatgggcggatcaactatcgtagacaagctagaagctgtcttcgataatcttgtgcgactcggatcggcgttgcacgaaggatcgagtcgattcactgagctcgcttcattgcgtctgccgacaaagccagaagttgcttcggaagcctttttgaggatgcaatctgagtcagtctcgttgcgtgagcgtatcggtcaaatcctggcgactgcacgaatgactgggttggtcatgttcacatctggtatgtttacggacaccgcaaagacgtcgacattagcttacgaggtggcttgttgctgtgctgattgtagccgacgcccaatgtctgactgcggctgaaactcacatcgaagattgcaagattcgactgcgggaccttcttcaaaccgcgcctgcacttgactctatcctcgagccggtcttacgaacttgtgacgcattcgctggacctttcctgctgccatctccttccgaccaagccgataggcaatctgcaatttgggaatcgacggacgcccttctggaggaattgctcatctctgctcagcaatgcgcaaaggtagccctatctttcggtgtagatgacgaatcgacaaagtctatggtctcgctagaggcttctatccgcagcatgacgtctgcttatcgtctcgacgccatcatctcagcaatcactcgcttgagcggcgctgcaactggtgaaagcctggacggctcggttgtgaccgatctcagcagtgtgctctcccgctgcgtgccgttcttgcataaataccttgcagcctgccggaagggtgtatggtacttggctaggaacgtgagaagtctctatcgacttgattatgttcttgtcaacctcttccgcacgcttgcggagaagggcttctgcaagccttcggaagcgggggaggacgattcgaagggtggtgaaggcaaagagattgaaggcatgggtctcggcgcaggcacaggcaaaagcaacgtcagcaacgagattgaagatgaaagtcaggtcgaagggctcaaggacgaagatcaaggcgatgatgaagacaacagcgaaaagcaagaaaaggaggatcaagctatcgaaatgggagatgactttgagggcgctctgtctgatgcggatggcgaagacgaagatgaggatggagaggacgatgacgaaggtcaggacgagaatgacctcgatgaacacgttggagatgttgatccagaagccgttgacgacaagttttggggcgacgagaacgaggaagacgaccagggcaaagacgacaagacggacaaaaaggatcctaaccaaaatcaggacagcgagatggcagcaaaggaggacgatgatcagaaatcgagtaaagacaacgctcaggaacccgacaagtctgaagagacagaggatccggcccccgaagacgacaattctaaagatgaatcagacgctgaggacggacaggatgacgcggacggtgatcaagacgatgctcaagatgatcgtccaaacgatgttgacgcccacgtgccggaagccgagatccttgacttacctgaaggcatggatctcgatcaagattcacaagatggagacctcggcgaggaggatggcgatgttggttcagaaatggaggaggacgatcctcatccggacgatgaccagtcagaggcgggatctgatgcggccgatgccaatgctgtcggctcggagatgggcgaggacgagccggaagatcatgatcaggtcgatgctgggcccgaagaggactcgactcccgagcaaggagagaatgagcaaggagaaggtcagaccggcgccggtgacgtcggcatggagggcgatgcgcaagaggctggacccgccgatgctggccaatccgaagttcaggccgaagccaatgaaggagcgcagaaagaaccccaagctgagcaatcgtaagttaccagctgtgacagagggtagagcctgttgtgatattcatcccgtcgcggtcacgtatagatccaacatgccacagcaaggtcaaacagacgcttttggggataactcggagttggcgaaccagggtggggaggtcgctcagccaacttcgaaccagactcagcaagatcgaagccttggagacaaattcgaggatattcatcgcatgatcaaccagattctcgaacgctctgacgatgacgctcgtctgaataacgaacagcacaaggacgcccaagagcaagcagccaagcaggtggagcatgtacgcgaagacgaggaagcagagatgcaggctttgggtgctgccgatagcgaggagcagcaaaagctggcagatcttgcgattgttgacgagcaggcagagccagtggaccacgcaatggaaggcgaggacagtttggctcctgacgaagcggatcgggagcacaagccggatctgacgcagctacaaaagcacgaatctcgaggacacgatcaggacgacaaggcattcactcgagatcaggtcaataagtctcgggatgaaatgctcgatggcgacggaatggcgatggaggaagtcgagtctgactatggcgacaacaaggatggacatggcatacctgaggatccagtagattcgcaagatgttgaaatgtcactacaaacgtggatggccagcggtcgtgaagcagagtctggcgaagagttgtggcgcaactactcgaccttgacgagtgacctgtcctacaacctgtgcgaacaactccgtttgatattgcagccgaccatggctacacggctccagggtgattaccgtaccgggaaacggctcaatatgcgtaagatcatcccatacatcgccagcgagtataccaaggacaaaatctggctgcgccgaacaaagcctagtcgccgagaatatcaggttctgctttctctggatgattcgcggtcgatggcggatagtcattcagtccatctcgcgtaccagaccctggcactagtgtcgcaggcgctcaccaagctcgaggtgggacaaatcgggatcgcacgatttggggaacacgtcgagatgcttcacgagttcaactccaacgccttcagtgacgcagaaggcgctcggatcatgaacacctttaccttccaacaacatcgcacagatgtggcccgtctagttgataacagtctagatgttctggcagacgcaaggagggctcagtccagtacgacatctggcgacctatggcagctcgaaatcatcatctctgatggtgtctgccaggatcacaatcagctgcgcaagttgcttcgacgtgcacttcaagaacgcgtcatgattgtctttctggtcattgattcgctcaagcccggctctgtcccgaccgatgcaatgccgcaggctgtgtctgcccggccatcgatcttggatatgcaaaccgtcgcctacaaggaggtcaacggcgagatgaaaatcgaaatggaacggtatctcgacacattccccttcgaatattacgttgtgctgcgagacgtggaagcgctacctgaggtgttgtcagagacactgcgccaatggatcgcgcgagtgtccatgtcggaagagtaaatttcctgtcgataattagccaacttggtttgtcatcggaacatctggcctgcctcgtcaaaatgtatctatgcatttatatacaatacaatcatcaacagaaactcttgtcgcttagatgccaacattacgtctccatcttcttgcgctgcgcatcttcttcggcttgcaagcgtcgtacttcttcttccaaagtctcgtatagaaacttcttgtccttctgttcgcgcgtcccgcctttcttgtaatatcctacgaatctagctagtctgacgaaataatacgtctcccagtcctcatcaacggaacggcgaatctcttgttgcagcgtgtttcgctcagctctgcgttcgcggtcagcggctctttgcttcatagcggcggccctttgctcagcgagcgctgtcttgtccccctctgtagcgtcttcagcatcacccgagttctgcctcttgcgcaacttggcaggtttgataatcctttgcggaggctgaccgcctacgcccggaacaatgacctcgaattcagtctcagacgtcatccgggtatccttttgtctcgagtgtgccggagatttggtcacggtgtacgggcggcgatccgtttcccagccaagaggagcgcgtcgtgactccttgattttttggtcatcgcctgacgcgtgcgcagcggtgaacaggcgcaagtcgtcgtcgtgtacgatccgtcgacactgaatctgatgtgtcgggcctagtgatgcagacggtacataaaacccagggatagcacatattcgaggagtcttgatcgtcatgatatattgacagctggagcgtagaacagcgtttatcgattgttagcatatcatcgagacgcttcttagttgggtcattggcactcacgtcgatatctccttgactccaacgataccgtccggcccatcgccaccgcaatggaattcgacctcgatcttacgcgctttcccggtcatgtcgcaaatagtgcccccttcccagacctcgaccaagtatctggcctgtgcgttggaatgtatagacaagctctgcctgacgatcttctcgtcgggagtcgcagagagactttcggggtcatccgccgacttttgctctcgatccattctcgcgagaatgctttccatctcgcgaatttgcaagccaatcgcaggatcgacctgtgtctcgatgatgacctcgatctcttgtgtggggtcctctggatccggcacgaaagctttcgagacgagaccttctgcttcggcatcttccaagaccatcctgtactcgtctaagcgttgctctagcgatagcggcgacactcctagatcgtacgcttcgaactggggggatggaagagcaggacggagacgtcagtattcgggagacccctcaaccgagaccaaaggacagctcacggtcatgtcttcgacgggcttcggcgccgagatggcaggggggctcgctgcttcgcgaaattgacggatatgcgagttgtgacaatagctacgaatgatgggatgattgagtcggtcatgtcggtagctttgtcacctttgaatcggcttacgcatatgtgaaccatccctgtcgatgatacaggcagcttccgtcaagaggatccaggtgacgatacacatctagtgcatcaggcgctacgtctctctcagcatcttgcttctcggtcatgtttttcccggccacagcaggcgagggtttagatacgaccggcatagcacacagatagtcgtgcgtctcatgggtcttggtggtattctgtctggtcagatcggacaaacggggtcgctctccgtaactgccaggagcactaggaagtttaacggggatgaccttcgggtagtcgctatcttctaatcgatattggtccctaaacaaagggtctgaccataatgtgtggagcagatctccttgctgattgctgatgacggcggttccttcgaacacgctctgccatgtcaaggtctcctcttcggctcgaggtacatctcgatgaccgagcccatctcgggacgtcgataattcctgccttaatgctgcttccgtgctgggtttcaagccttgcctccataaatcggcttccttcctgcctatcggacgatcattcaggaagctgaccccgtatttaggcgaagcgaaggtatcgacagggaaggaggataaaggacggtgctgtagagcgccatgaacgctatcaggttgcgatgcgagcaaagccaacaggaagagtatattggcgggaacggcgtagtacatcttcatgtgccaggatagctcataggtctcgctagcaactcgcagagtaggtggtcgtccgagactggtggagtgtgggcctatgagcagcccaattgaaggtagcaagatttgtgcgagtcagggtatagagatcttatacagaaatgatgaaggccggcacattcgaacgctgatgatgaggttggaactggttcaatgatgacgaaccctttgagtattgaaacgatccccgcttacgtaatggcacgtagcctaggactggcctggcaagagaaggggggacgtggactcagaggcgatcggttccaaggttcatgatgatggtctcatgctcgtctctcgttctgatattaggtatttacaacgttgatttcggtttctttggctacgagttcggtctttcgttaaaaaggagagaatttgaatgcaaaagtcgaaccaagggcatttgccaggttggcccgctcgatccctcttgctgaacggagggcgagctttcgtgtgattgtgtgtaatgtgattggtcatggtctgaccgtgtcgttgatgtgacaagattggcgttgggatactggcgaggtgatactgggcgggtgatgcgagccctccgctctcagtcaaagtagaagagcttcttggcatcacccttggcaagagcggcgggaggcaaagcgtaggtagtgaccttgccctgcttctcgagatccgcccagctgaaggaccgagtgctctcggagaatttccgttgccgatcgacaggaccagaggctagaggagctgtcgcttggatatccgtctggatttgggaattggcacgcttgcttcggccgatggttcccatcttttcatcgaaagatgaggcgacctggcgagaagcggcctgaggagaagagggtgacctgcagaacctgggtttcgagggcaacgatccctgagggacgatctggtccccaatggtaatggcggtactgggagtgtcccggaagatgaacgagctgtttcgggggagactgctcttgaccgagcttttcgagctggcgacagaggctggtcgaaccctcttgcagctggacggctcatcctcctcttcctcaaagatgggaaactcgagctcggtcttgctgtctcgactgatgctacgtcggatagcatggcctggactagcgtccctggtagcttggacacgagattcgcccgctaaccgctgagtaggcgtggtggccaaactttcctgcttgtcggcgttcaagtagtctcccagagtgagactgatgggagcaaacgagtgtcgcccgcgcatcgtttcggcagacgtcgaagctcgcttttccatcctgagcgcgtcctgaaacgcctcttcctctgtacaggaagctcggcgggaaccgccaagagctcgatggggccgggctggagggctgatgggcaaggggcgagcgagctcgatgctggacggcgtccggtgaaaggctgcggcataggattgaaacagggtcgacgcaggagccgactcgggctccccgttatggttgctagatcgtcggctcatggcaggcgtgttgacactgtgcagccgaccgctcgagctggttccgttgacggcgactccggcctgcctgctgaagctgagcgacctcgcgctcaccatgctcggccgtcgactgttcggtgagagcggtccggccggggattgggcaccgctgccgggcttgttgaggggtgtgaagcctcgcagaggtcggccgtggaggccatatccagcgtacatggacgcattcgaatcttcgctaaaggtcttgccgtccgaactcgaccacatgctggacaagctgtctgacgaggagacggtctggttgtagccgtatccatacccggcagacccgctccccgagttgcgcttcatcatgccggtcaagatggaaggcgtcggcttttgcgaaagactactcctgcgtcgttctcgctcgaggagaccgtaatcgacaccgcggacggccatgtcaaagtaccccgagaaatcaaactcttcggaagacgtctgcgagacgatcttgggttcgacctcggctccggcagtcagcttgactttgatggtaggttcgttgagcttgacgacatcttcgccttcagaggctgatgcggacgattcagtaccggcccagagcgggctcggaagctcgtccctctcgccggtccagtccatcgcttgcatctccttttccaactggttgatctgctccccgctcctgaccatgtccgtttccgcgcaagctgccgagcaataaagttcggtgttataaacgggcgcgacagggacagagatgggagcaggtgggctcgtctcgatgggtgtaggtttgatggccaaagcggccaaccgggtttgagtgtttgtccgtttcaacccgggctgggtcaagttgttccgctgagatacatgtaaagatgctcagtcacgttggcttgaagttgtgtggggaagaatcgactcacctttagcttcttggtaggtatccgtgcaggcatgggtttgataaactggggtacaccattctcatccaccttgctcttgttggcgggagggttaccctcggcgtcctcctcgttggcaggtcgcacgacagtgatcaagcgatcgcaaacggcacaccaggcgtccacctcgggttcggccatgtagggcgagtccgagcgcgggatggcacgggcgagggtaggcgttaccgtcgcgctggtatgggcggaagagctggccgagggggtagagtagggtcgagagggagcaccaccgttgctaaagattctggacatggtagtggcggccatctcgctgatcttgcgcaagcgggagatggagatccgggccaggtccgggatggggaggagaggtgcatcgagaacgaggtttccagcgtcggccgttatggaagagaggcgcatggtggtgaatgtcaagagatgggatgaagggagcgatcgatggtgtgagctttaggtatcgtgataaaaaggtttgaacgagggaaagggggacaacaatttcgactccggattttccttcaaaactggccagtctttatacgcaagcagagccccgaaaggatgctgtgctcccccgtccgtgccccttcgaggcccctgctcgtttagaacggggcaaacccgactatcccagcccgaatcgcaacagacgcgattcccccctgcccctctcactacgggaacgcgaacgagcatgacgtagattctcgattcggactaacctgttctgggtgtggcttggggttcaggttccgttcacgagtagttgcagggcgacagggcggatggtgtcgacgtcgatatgacgatatgatgatggatgagaaggcgaggcttgttcgagtaggctcgtgggtgactagacgacgagcctaacaatccatatggatccttaaaatataaaggctattaggcgaaaacttgctgggttgagcggggcaaggtggggtcgaagtgatccctttatgtggtcaaagtatggaggcccggtcaatccgtgtgcccccccccccttgttgactattttcccctcgtgatcagggtagtgagtggtctcgaaatgtcccttgaaactccaagacccggtgcgaccttttcgggtcagtcttgatgaaaggggttggaaagggagaaggaaatatgatgacgtcgttgtaaatgcggattgacccgaaaaacgatgtcccccctcagaggtttcagagcgaatcgttcgactcttttttttcccccgcagtccgatgaagtgatggctggaatggcaggaatgacagagagggaatatcggcaaggagtgtcgaagaccgaggtgatcctgatctctgtacccagagattgtcccaacgtcgatttgttgtttttgggggaagatggtgggtcgcagaggtcctttgagatttatccaccgtgctcttgatccgccggcaagtgggatgtgttggggacaaatatcgatcacgagcaaaatgtagaaggcgagacagttcggccaagggatcgtagatccggtagtctgtggtgatggtggtcgaccgagttgtctcaaaggatccagtaggttggtctgggcgatcgaaaggctggtttgaccgagctttgtatcgttccaatgtcgcgatttcgctatctcgacgcgataagtggtggtcaaggtggatcgttccgcgacaggcgacagggatggctgctatattcgatcacgacaacgacaagaaacgaacgaccaggatgattgtatgttgttcagaactgtcgacaaacaagacctcgatggctccaagatacggtcgttctctatccttactcctagccccagagcccgtacccggaactcggatcgctgtttcccatctcgaccatctgtctactccgaacgtaccgaaacaaccgatctctcggtctcgccgttagcttcaaacaaaaggggcagggcagccaaaaggcccggcgtcgtctcggtgaaaagggtgtgcccaccccccccgcccccctcccccatcttctcggcattctaccccacagattgatgatcaccgcgtgactcgactcgccgcccgtctgccgccagcccctcgctcgctaacaggcaaaccacgcatcacatgctcgtcgtcgtcgtcgtcgtctcctcctcgccatccgccgcccgaccgtttcgtcccgttgcacgaaaacaaaagctagaaggaactcgctcgaacatgcttgctcgggatcatcgctcgacatgcccgctcggggcgcgacgtgatgatcgccgttcccccacagttcgagcttacaagctacgagctacgagcatctttacctcttgtctggacgggctctcgtacggtccgtgcgaccgataggcggcgacttgccactcgctcttcggtgactttcttccctctggcctacagttgtcaagcgcaaacacgtcggacccgcatttccagggttgaaccttttataagttctagtcagactccagcttgatgagctacaaacatatgacaaccgcgaaggagtgacacagacgagtaattcgtcgttccgcgaagtactggcgcgggggggatttttttttccgggtagagagcgttctcccggatcctcgcacttcttccatcgtcccgcaagccagagtctttcacaatggcagccgggccatccatcacgattcttacgaacgtgcagtagggctatctcagccctctagaacccccatacgtgttcggccgtgtatcggtaaccagtgatcggctcgaacgggctacttgacccaccatggtgcgctctatggcagccgacatgagatgaaacagtctattgtcgacttcgacgatatgatatgcatcgaaggagccgatgcctcttgatcctggagtgcgacccagcccatcaaacctgggtcatgaaccggatcttcggggtgacaaggatgtcgacggacctctcttgaaaaagtataaactttccgaaacgtcaccatcggactgccacgtacgattgagcgggtatgactcgatgcgccattgactagatcgaatccaggggcggcatggtcgatcccaacttggctttcgaagcggttctcacttgcccttatcggtctcgagcgacagatcacaaggactggggatcaatagctgaacagaagaggttcaacagatgatagatgacggatcgttagaggcgtagaggtcgggaaggatcgttcgattcaagcgaggcaaaatgtttcaggctcttggaggggggcagagggttttatacaccgctgcgaaatgtcacattcggttgcgctgtcggtggcgagtgtccggcgcttatctgttagaggaggtactgtaccgcagggcacgtccgttgtaaaagatcgatcatcatcatgcttgacaagtttcatcatgggtcgttcattcttgactcctatgggtttggtagggggcaaccgggtcgatgcccatccgaataacggtgcctcgcagtatcctccccctagagcggacctttccctttgatctaggcgcagcttctctcaatactgccagataactgctgaaacactgcggacgcccttcccttccacttgccactaagtcagagctcgctctcgaagagctatatggtcgagcccggaggtcgaatccacagtgtgataaactggcaataataatgattgtatttattactacgtcttgcgagcttgaccatcttttggtccccgctcgccgctcctaaaagcccccacgccctgtttatctggtttctcggtgccaatctcaccgcttcatcccggataaatcgacatgaacggtctacccatagtctcagcccaagccatatgtatgacgagatccccccctctcagcctgcccctccaccccttctctgcccttgctctctctcaatctctcccttgcgcgcgccttgactcgattgccgaaaagatttcctagcaaccaagagtcgctcgggccgttggtgggatatattcacctcctcattcgatcatcatctcgtcgtcatccatatcgttcccgagccgttggtcttctgcccatacaaacaaaccaccacgaattgaccacatagagatacagaaacaaacatcatgtgcccccacgtagacgatatccccctcgacaagtccgacgccgtagcgatcgagaccgactctccccacatccccatgcccaacggcaactcgaacgtcgaatcctcttcctccgaggacaagtcgacactacctcccgccgccaagcccgttcaccaacaacagaagaagaacgcttacggacccaggtactcggatttcttgagtaacactagcaactggagcgtgagtgtttcggggagagaccaggaagttaccgggttttcggggcgaaagacgagcaaccatgatttcgggtggagcgcgcgaggaggagcagaaggaaactgacgaatctcgtttttttactcttctttcttttgcatgctctcgcatcgcatcgatgtcatcgcacccttctacattgacgtctccttcctcgtcgtgctcaaatcgtccgctggcatcgcggcatcgtcggtcgaaaccacctttgaaatcgccaaatcccggatcaaaccttcgaacgatgtcgaatcatccgcgacacctcttatcgcccttaccatctgtctacacgctttcactctctacctccttggtacacaattgcactcggtttcgacctctagatcatcgaatccaccctcagagagggtgagcagttcgccaatgcctttttcaacttggagaccaagatgaagattgccaaggcgtgagtccactcgacgtcatctcttcagatacatcttactgattcgtccgcaacacatcgtagtctggatgactttggtgtcgagtacatcgagctcacctcgcctgccgcttcgcccgagtcgttcgaggactgcaaggccatctgtaacatgggtttgaagaaggccaagtgagtgatactgctccgcacaccgattccatgtttgtgtcgtgaggctgatgtgcacaatgtcctaccttgccatttctcttcttcattctggtcatgccctgattggcgcttcttctcctatgccctctgaacctggaacgacaggatcttgacccacatccgatgtcacatggacgacgcccgactcgccgtcgagaccggtgttgacggtgtcgatgtcgtcatcggtacctcgtctttcctccgtgaacactctcacggcaaggacatgacctggatcaccaagcaggccatcgaggtcatcgagtttgtcaagtccaagggaatcgagatcaggttctcgtccgaggattctttccgatccgagctcgtcgacctcttgtccatctaccgaaccgtcgacaaggtcggtttgaaccgagtcggtgtcgccgataccgtcggatgcgccgaccctcgacaggtttacgacctcgtcaggaccctccgaggtgtcgtcagctgtgacatcgagtgccacttccacaacgacaccggatgtgccatcgccaatgcctacgccgctctggaggcaggtgccacccacatcgacacttcggttttgggcatcggtgagaggaacggaatcacccccttgggaggattgatcgccaggatgatggtcgccgacccggaatacgtcaagtccaagtacaacttgcccatgttgcgagaaatcgaaaacttggtcgccgaggccgtcgagatttcggttcccttgtgagtcgccactcgggccaggcgggttctcctggaagggaagtagctgacgaggatgtgtcgccgcaccgctagcaacaactacattaccggattctgcgcctttacccacaaggctggtattcacgccaaggccatcttggctaaccctgccacttacgagatcttgaagcccgaggactttggtatgagccgatacgtctcgatcggtcaccgattgaccggctggaagtgagtgactcgtgccagccgacggtcatttgattccgcttcatgctgatcgccctcgcttcgacatcgcctcatcacagcgctgtcaagagccgtgccgaacagttgaagttggagatgaccgacgagcaggtcaaggacgctaccgccaagatcaaggagttggctgacacgaggacccagagcatggacgatgtcgacaggatcttgcgtatctaccacaccgccgtcaccagcggtcagatgaaggtcggagagcaggaggttttgcaggagttgttggacaaggtgagtcttgcttcggtatgctctcttgagtttccagcgacgtcgtgctgatcctctcatcggaacgtcctgcagcacatgcccgagaacactggcaacgccaagtaagcgcgtgcgagccatccgttccggtccgccattcaacaacggtgtaagacctgtgaattccaaaagaaggaggaaagacgtcactgcctgtgcatcacgggatccgcagaaggctctggaagacgatccacaacaccaattttagaggagggtctgtcattcaatttccgtgatcttcgtcgtgtttcccgccagggacatgatcgtttcctctcgccgtcaatacctgtttctctttgctcgtcctactcagcctcagtcccatcttgtctcgatcttgatcatcatattgaatacgtgtatccgtcaggacgagagatgatggtcggcgaggtgactttgaggggttattgagctatcgatgcgatccagcggaagcagatctgcaccactgctcgctcgtccacggctcaagcctatgttggaccgatatcaacagctacgaactcatgctgaatgcatgcaagcccgttcattccacaggtctcccatacatcttcatagacaccttccagtctcccttttggtcggctataaaagctgcgagagtgccttcttgctcatctgacgccttccttcacgccctccgcaaacattggacacgaacagattccgtcacatctcgcctgttaaccgagatcatcatcggctcaaggttggcaaaagtacaaggcggagagacatggtcatgttccggcgttgtctttccttcttggcagtggcagtggcaggactgggtctgatgggccaagtggaagcggtcaagtttgagatgacagcaaaggcatacccagagacgagtgagttgccggttcgtgctgttctgcaggaacgcttgctgacggagctaactctcaacggtgtatctggaatggaagaatggcaagtccgatcagggtctcacaccatgtcgagctgcccaaagctgatcgtacgatcacgttccctttagcatctggaactttgcaaacgctcatacgctcgtcatcgtcaccgccaacgtttcccccgggacctcgagtccaggtggtggacagctcgaccggatagatgttgagattgtcgatgggagccacaagggcaatgtgtacctcgccaaaaaggtttgccacacacgccaataatgtgtgaggaggagccggcgcgctgatctgaagtcgtcatgaccacttcccgagcagaacatcaagggagagaccaggttggccatcaccacgcatgagatggcggaagttggagtctgcttaagacacacactggagccttgtcagtctcgttttcctaaatctatcaggtagagcgtcgagctgacactatcccataacagcgtcttcctccttcagccatggagagttgacgaggatcatcgaccttgacgtcgacattggttcagacgcagtcgattacaagtcagtctcgtggcctcattttcaattcgaccatgctgactgagctcggatttggttttgttgcagtgctatcgccaaccaggaatctctgtccattctcgaggtggagatgcgaaagctggagggtgtcgtcaaggagatttcggacgagatggactacttgaaacgaagagaggaaaggatgagggatacgaacggtgagcctaggtctcgtgtcgctcttatgctttgagatcggtttggtgaccgaggtcggtctgaatgatccagaatcgaccaactcgagggtgcagaactttgccatctttacgatcgtcgtcctcattgcactgggagtgtggcaggtgggtacatgagaacgaatgaactcgaagaaattcggtgctgatctgcaatatctcggtcagatcctgcatttgagatcgttcttcaagcggaaatacttgatcgactgaacgtggcggtgttgcctgggatcacgaaacgctgtaacgagaggagacgaacggcatccttatatatccatcgcatggttcgaaatgctcgtctgcacgcttcgaattcaaaatcctacaccatttgacttcattcccgttattcgaattcacctcgtcatctgcctgtctgctgctgttgctgctgctgctgctgctgatgtcactgttgtgctcaattcgacgatggttgatactgtcaaacgccgtaacatcatcgcgtttcgacacttcgcccatcagcttgactgtcctgttgttgcgtcgttgcgtgttggcgaatctcgagtgaactaagcgatcaaacgtatcttaaacccaaagattgacatagaacgctagcaccaaccacctttatacatgtctgccacccacatgtctgtacagcttcgataaaccttcataccatccgcaggaatctagcggatctatcgttagttcccaacatcgtaggaatagtctcatacggaagaccggtgcggtaaacacaatcactgaattcgacaacagcttggggaagccacattttcatcaaagtaacctcataccgtcctcgaccgcatggcctgattaagtattaccagaacgaatcagttgtgatccttatcggtgtgtcatggagggttccaagggcaagaggcctcccccggtcgagggcgccgagtacctgtcgaaactgctcaaattcctctcgaccaacaagacgagattggcgacacccccacatgcctcggctgtaggcacgcccgtgggcaatgtttggcaacagacgtatactatcgctacgctcggtctagatccgcaatcttccccgttgaatcccaccctagctcaggtcttcagcttgggattggcctcgccatcgacgaccccgaggacggcgacggggaagaatacggtccgagcggatgtcaagccgctcacactccgtctacctccggacaggcttctctatctgttactgctgttccaggattcacccactcaatcgatcagttcttctcccaatctgggcaagacggatatccccgttccacctgggatccagctcgtggcaggcgcaggtgggcatctcaaagggagggaagggagtcaggagggcgacgtcaagtctgtccagagctgggtcggaagtctgaagagcgtcggaggagtgtttggttcaggtgggagtgggaagaagaaggctagtgattcaggttcgacatggacgacgtggttcggaggtgccaagcgggaggctatggataatggtatgtctgagcgttcgtacccccgaatacaggatgaaattgtgagctaaatcgacggtcttgttgctccatatgcttttagatgccaagctgcgtctcatctatgcggcgttcacgatccttccttcactggcaatctatccgcccggtccgaccgaccccttgatcaaggagcttcgggatgaggacgcctacacttcgttgggtgggatcgacgttcgagtacctcttaatgtcttccggagtctcctttcgtaagttcacaggctcctgaattgcctccaatgtgtactgatctatgaaccttgtgtgtagccttgagcttgatggatatgacccgagaggggtgctcgtcccatatctgcctggactgcgcagcttgacggtcagagacgttcccgacggggaggactggttagaggagctcttgaccgtgtctcctcaagaggtacaggacgtttcaaagccaaagacggaacggacggtcgacactggggaggacgatgaatacaggggcaagccgagatttccctcgctgcgacatctctcgctgccttccacttcgttgttcggctttcccgagatcccctacacgaccttgacgcatctcgacctgtcatcgaacctcctcaacaccattccttcatcactttcttgtctgacatcactggagagtgtcaacctgagcagcaacatgatcgaatccgtacgaggtgtcgaaaacattctcccttccctcaaagccatcaacctacgaaacaatcggatagactgcttgaccggcctcgacagactcctgctcctcgaacgagtcgacgtcaggcgcaatcagctttacgagagcgacgaggtcggtcggcttgccctctgtcccaacctaaaagaagtctgggtcggttcgggcaacccatacctcgagagggaagaggaatggcgagtcaacgttttcagagcgttcgccgaggaagggagggaaaaggctttgctggatgggtacgaaatgacatgggcagagaagaggacggtgcaggccgagctgcaaaagatgggcaggacggcgggacagaactcgccgggtcaatcgcggtcgtcgaagcctgtcgagacattgcatcagcccacgccgctcaagacgcccgccgcttcgctgagaaaggatcctttcgacggaggagcggcgaccaagacgatgcgtgtacatcattcgcatgctagcaacacggccgaggtggattcgggacgatcgaccccgctgaacaagcgaaagcggcagcgaatcgtcgatctggatgggactgtcaggatggcttccgagtcggacgacggtggcacggcgagggctcttcagggtctgaaactgggcagtaattcgagtggcggccttggggatgatactgttccgactgtggtacctggccagttgacgagtgagccagaccaagcgagcctgttggaagccataagcgcggaagggcccggcaagcaggctctcggatcgaataatatatcgtctcatacccgatccagaacgaccgatcataatgaaagcgatgacatcctagttaaggtggctggtcggacagagaagaaatcgagacgagctcgggcgtccgcttccgtctatgagcccagcggaacacaggctggaccatcggagctctcacctgaagagctaagagcgaggatggaagcgctcaagaacgaggttggagattcgtggctgaaagtgttggcgggacaacagcagcagcaacagaagttaatcactggtgctgcaaggaaagctcctcgtcggatcgaggaggagcggcatgagtcgcagagccagtcatcgaatgcaggacgggaagatgcggaacaaactgtggttcaggtcgttaagcggtctaaagccaagaagaaggcggtcggcgagatcaagtaggaccggaggacggtcggacgcggagacacggatagttcggatatgcctagaatccggtctgattgggttgtacaaggcgtttgggtatgcgcataagacatcaagatcttcacatcgagcccaagatattgtatgggcttgtcgctgcttcatgtcgtgttgtttgcgcttcacgatcgatcgagtcgcgagtagaagtctgatcgaacttgttcatggaggcactcgactttgcatctgttagaccttgggatcgttccactctatatcgacaacaaattgatatatacagacatataaacacgccagtaatccagtagaatcgcccttgacaatcaccatacttgcgatcaagtggcccacgctgcttcgacgtacgctcttgaccgctctcctccgagcacctgcttgtcgaccgttccatcctgtatcacccggctttgtccgcctcaccgatctcaaccacctctcgaaacgctcgatcatgtcggaatcacccctctctgaagttccgggatcgcctccagcggcaccgtctgcaaagacggccaacaagcgagccaagaaggcaccgacttacaaggacgaatcgagcgagttgtcttccgaggaagaggtgaaaccggctgccaaaaaggccaaagcgaacaacgggaaagctcaatcaaagaccaaggctccggtcaagaaatccaaggcggaagaggctacggatgatgtcaaagaagaaacggcaaaacctgctgctaaaaaagctgctccgaagaaacgtgaacccaaggtcgaccctctttcggaagaatctctcaaatctcacccgtgccgatgcggaccccctgcatcgctcggtcctgaggccacttcggaatccaagtaccataccgctcaaggtcccacgcaccgaatcggagcccatacatccgcctcgggtggagtagagaacgctctcgtcaacgcatcccagttgggaggacgcgcattggccttgttcctgaagaaccaaagaaagtgggagagcagccctttggacgaagatggcgtcaagcgtttcagaaagttaatgctggagagggatatgggcggtaagtgacgttcgtgatcggcgtctactctgtctgaccttacaatgtcgcgaactttgactgggcgacctaggtctcgattactcggccgactacattctacctcacggctcttatctgatcaaccttggaaaccctgatgcgtgagggcctttagaacgacgtgttccttcctgggatcgaaatcctgacgagctcaaagcgttacaggtcgaagcgggaggtctcgtacaagtgcttcctggacgacctcaaacgatgtgaacagctcggaatccatctttacaactggcagtgagtctctatgtggcgcatagagatcgcgtctgttctgatcaggacctgcttgtagtcccggttcgaccgtgggagcttgtacaaaggaggaagctttgaagaatgtagcagcgagcatcaatcgagcacacaaggagaccgagttcgtcgtcccagtgatcgaaaacatggtgggtcactttcctgtcgagaggaggatcttgacctcgaagctgatggtgggtatcttgggtgggagcaggcaggagcaggaaacattttgggagccacgtgggaggatctggcgaccatcattgaacacgtcgagaacaaggatagggttggagtctgcattgatacatgtgagcttatcggtcaggcgtatccagtgctgctgctcattcgacgttctcggtacaggccacatgttcgctgctggatacgacatccgaacgagagagacgtatgaagagtcgatggcctcgttcgatcggatagtcggatttaaatacctcaaaggaatgcatatcaatgacagtcagggaggcggcttcaactgcaaaaaagacaggcacgagaacatcggtttgtaagtcagcgaggcagtccagtaatcgctttcgccgctaaacgttgttcgtatccacgcataggggagagatcggaatggcggctttccgttttgttgtacaagatcaacggctcgccaacatccccttgatccttgagacgccgactttcgaagagaccgaggtatggcgacgggagatggaaatgttgtacgagctgcaagaggtcaacggaacggacgacgaggtcgaggccaagttgaaggagatgaccgagagttggagggcagagctcaaggagatgcgatccaagagcggaaagggaccgaaacctaaggcgagcaaagccgagcctgctgcgaccaagggtaagggtaagaagacacccgtggccaagaagggtcgcgggaaaaaggcttcggacagcgaagattcgggagaagattgagcgaatggcatgccgatcgctgaatagtttatggcagttgtagcgcgatgacgctctattaattactgtatcatccattgcgatgtcgttgggaagtttccggctgagtgaccgatggtggccgcggaggcggtgttgccgacgagggtgacaacggtggagacgccaatgatgacgagcaacacgatgaccaggagggccagggaattgaaatgtgcagcggaaaggtggacgttcaggacgcaagggaacgacaaacattgccgcgaaagaaacgagttcacagcgttatcgcccttgaagctctgtttcgcttgttcttccccgagtcgaatctctcaaagtcgacgtggctacggtaaagtaccatcttgcaccacatgtgcagcgcattaaagatcgcatctcgttacaacatctagatccagcaagatacaaacatatcgcacggagacgcctccggctactagatggctccccactgagccttcttgctgcccttctttccccctcgtccacccctggcgctcttggctcctccccgtcctccacttgaaccacccctggctccacctcttcccccacgggcggccccaccggaactgccgcctctgcgttccttggcgatgtcccacttttccttcctacgtgccttttccatctctcgcatctttctccgttcggcctttgtctcgaacgaacggtaatcgctgctgatctgcttgatattggatttctcttcgaccggggctaggctcgagatgagtttcttcccttgggggagtttactctgggcgaggcgtttcttggtctgtttccgggacgaggggggcaggagggggataggcgccgagttggcagcagcagcagccgaggctgcctttttctttttcaggcccatgagctcgtcctcgaaatcgtcctggatggtgaccaccgccatctgatcgtccccttcgtacgcttcctcctcctcgctctcgtcatcatcgtcactctccgcagtatcactcccatcgactcccatcgcttcgtcatctgaccctgcgccagcccctgcgtcgacctcgatctttttcgtccggcctcccgaccgcctcgacgaagatcccttgtagacctctccgtcgtcctcgttcacaccgtcgggatcggcagggagacccatcgccaaccggacttgacggacgttctcctcggcccttcgtttcaggtctcgacgggcctgcaggtcggaacgagtcgacaagcatggcgtttgagggacgagtcaatgatcgatctatgtgtaacacgggggggtcggactgacctctcttcgttcggccagatgctcgtcatgatccctcttcttggctcgttgacgcctctcttcgatcttggcttgttttcgcttcctgaacccggtcaagaattccctgtgaaacgacgacgacaccgagagacgacaggtccgatgatcagctcgtcgtgatgctatgtcttttccagacccaagtaggatggaggaacaaaagaaaatcccgcccggcccgacgcttactttcgtttatcgtcgtcaaaaacgatcttttctacctcgtcctgtttgccctttttcgcccgtttgatatacccagcaccctcggtcaagagggagacgttgctcctgttcgccgagcgggaaggtccggccatctgccgaggcgggaaaatggtatgaagttccgagctcatactggtggtctcttatcctggttgtcccagttctgttgaagatgggtttgtcgaggattgtcgtggacaagagttgatcgattttcatttcaataaatgatgacaaaagttcaagttgtcgaggtactcgtacttgataactttgagcgaggtctcggaggagagatcttcagattattgttgtcaataaattgattcgttgtgaatacttccgatgagtcaacctgggatattagcttccgacgctactctttatgacgtgtcattcatgtaaataataattataattctggcttttgatcgccgatcaacctttggattatggatgagcatccagtcgcaacacatagagtagtaggcatactcacctacctaccccatcatcccgcctcggttcatctctccagtcaatctcccacgtcatactagactggggatcgtcatcatgacagaagaagaagaacttcagttcgctctcgcactctcattgaatggcgagcagaatcgacctcaacctgaagctagctcgagtcgctctcgttccccttcacccgtgatccctcaacagaccctccgtcctgaactaccgaaccgtacgatgagcttacaggaacagcttgcagaggtacgaagacagagagctcggcattaccaggatcatcaggtcgatacggcgatagaggcgacaaggactgtggaccggaagcaagaggctgaaaaggtgacaaagccggcgatggcaacgtcggtggcgacgacggcggggtcgagtaccgcaaagaaacgagcactggaagagacgatagaatccaagggaagacaagccaagcatgacttggtcgacgatgacgatgacgatgacgagattgaattcgttgggatcgccaagaaacccaaacctgaaccggcaagtccaccttcctcccgtcgtcctttcagtatactgaccctccatcccgaattcagcttccatatacgtcgatcacaagcaagaactctggcacgactttgacctctttcccctcctttccgtacccctcgatccgtatgacacgcactcaaggtcgacatgctcctgctgccgcgaggaagaataccatctcattcgacgagattgtacgaaagccccacttgaaaaaggcgttcatctatagtttcttcatcggccaggacgagttgttcgaatacctgcctgttggcgaatggagcgatgggcggaaagtgcccgtgagtctctcgtctgggttacccgtcacaaaccgtcccgctgacccgcactcccgacgatgcccgtagatcatcatcgggcgggatatgaaccaagatcccatcccccatcaaatcgcgagccgtctcgggctcacactggatccgtcttcttaccagaagatggaccaccagtcgttcgagcgtatcgccctcgcttcagcccagatgtacgaggggctgtacggggagaatttcagtgcggtttatgtggagaaggctagggtcggttgtgggcatagcaaggttggcgtcttggtattcgagaagttcctacgggtgagtcttttgcctgacgagggaacggggcacgaaaagaaatgcgtcggcgttcgagagctgatgatctcccgcgagggtccctgcggtctaggtgttcatcacgagtgcgaatctgatggctttggatctcgaacacggggataacgtgagtccgacttaccgatctgagcgagcgaccgggccgagactgactcttcccggtcaacctatcagcactggttcatcgtcgacctgcctgaacttccgactcgacgatcgaaatcctcgccgacgcccgaattcgagcaagagctcttggaacacatcgccgcgctcgggtgtccaaaggatttcgtcaactcgatttacgctcgttacgactattcgtccgtggccgacgtgtccatcgtcgcttcggtcccgagttcgagcttttacaaggatgaggaaaagtcccgattcggggcgatgaggttacgggaaatcgtccggccgatcttggagcaagccaagctcaaggacgtcgagatggagatctgtacggcttccatcggcgggatgcaggaggattggttgcgagcgatgcatcactgttttaccggtggacgatacaaacctcttgataggaccgatgtcccgccgttcaccatgacgttccccacccgggtcgacgtcgaagcgacccgtgcgcattcacaagccgggtcgagccagatgggttcgcacttcaagtacgcagactcaaggcccgaaatccagggcatgtttcggcactacgtctcgaaggatcaagtctcggacgggacggggaaagggtgcctgttccaccaaaagttctacatggctttcccaaagggtactcgccagcgcgcagaggacgagccttcggtcccaccggtttacctgtatctcgggtccgccaatttcagcaaagcggcttggggcaagcctactcccgagatcaaaaagaagcaacccgcgacgggggaaatgatgaggttggcggacgtctgcaattacgagctcggagtcgtcatccgcggtcaagatctcgtcgggatgctcgagccgggtagcaagtgggaggacgtcatgccgcatgaacgctggactgaagggtacaaagggagggacaagccgtacaactcggaactttgggtcaagcgatgatgacagaacgcgccggggatcacgacacgtatcgacttttttacgaaaaggacaatgaagagcgacgaacaacgttttgtgcatgaatcggatgagccagcatgtcagggctgatgaactgtatcaaaagaaggcgtccagacaagggcgcggtgacggaactatggtagatgatatgatgacatgtacatgaaatgaaagacaaatgtaaccaagaacttgctctccccaacgccggcgattccacgctcaagcaaagactcgaccgacggcgagctcgtcctcctccaactcgtccctctgcttcgtccgcctgtcgtccctctcggactgaacattcttcctctgcttgtacttctgtccctggatacgcttgaacgaagctcgtgcggaagcgggagagatgaactctgtagcgatagcgtgggaagcttgatcagctccggtgtagcatgaagatgcatgtttcgtgcccgaccgagcagactcacctgggttggcaaagatggtaggtccaccgaaagaaccctcaaagatcctgatcggggtcaaaacgaatcgaggtccgatctcgaccaagctggtgacgggaggtcccgagggttgaagaggatccttctcgacaatctttagcagtacccgaggttcaaataagcatctggctgttttttcacctagggaagagagcttacctggaagtttcggaaccagatcttgttgtcgagcaaagagaaggacaggatgtggtcgatgaagggtttaagctttcgagagcttttgggcacgctgaaagtctacgatacggccatccaaaatcggagcttgatcagtgactgtttgtcttgcctgtcaatccaaacctcggaacggctcgactcacgtgcgtcaacatctctctcaacaacttccactgctcgtcaccatcccaacctccatcaaagcagaccaaacctcggctccctttgaggcagtttcccgtcattttgagttcgtccatcgtgtggatgttttgaacgtgacatttgaccgaaggaccgttgggcgatcgggtcaaccagaggtagagatcttcatgccgacgagcttcaaagtagagggtgttgttgcacgagtgaaggtcagcgagctcgttgacgaggtggagagaagacttcgagtcgagcttggcgtctgtatgaacatgaacggtgtagtggatcagcttccacaataccgcgacctgattgactacatttcgctccgactgaccctttttcaaatgggggaggatggcctcaaggtccaacatcaggtgcctcattcgcccagtgatacctctcgaactgagcatcaacaccttgtcctttcgcctctgctgggccttctccaccttgtcgacctcgccgaggacgacagtctttttcttgctcgactccttgcccttgcccttgtccgtcttgccgtccttcttcgcatcaacctggtttacatcctcgacatcgtcatcttcatcatccatgtcgacgtcctggtcgtcttccgagtcctcttcaccggacatggcgacgccagcctcgagggccatgtcttcacccgcagcgaggatgtcggtcctgggaagctttgatcgggacttgcccttggcgttcgaggccgccttggaggtggttttcagcaaggtagacataatggatataggtactatcgagatgatgcaattgcttgtgacaggatctattgtctgtacgtttaacagctgtgagagagtgattgcatatatgatcgatagctcgatagagtgttggggtcgagcgaggctccgaacttttggaacgatcacgtgatctcgacgaggtcgaccacatccaaccaccacacaccgatgatgatgatgtcgatgttgatgatgatattcaagtggacaatctagagctcctagttcgttcaggctcttagacacaacacggcacactccgagactcccagcttcgacatagaaggttgcaaggaagctagacattcgacatggtgagtcgggttgggcggatcagatgattggagatgatggacaaccaggctcacatcttcaacccctcctatcgtgtccctagcttcctctttctcttctcaacgccactcagggcaagcctatggtccgtacacattcgtccgtcacggtggcggccatcgatactgacttgacctggttcggttacgacttacccacagctggtcgagctgaaatccggcgagacctacaatggacacatggtcgactgtgatacgtttatgaacgtcacgctgagagacgtctacctgacgagtcccgacggagaaaagttttggaagttgaaagaggtttacatccggggaaatgtggtgagtcttcgttccgtgtcatgacctcgccttctcccgaggacgctctgcctggacctgccctgtccgatcgctctgcagggctgggccgtatgctgctgcgtcaaccaattagcacggatttatctcgagctctggcttatccccaacattttctccctcctttgccgcagataaagtaccttcgagtagcagaccagatcctcgatcaggtacaggaagaccaggtcaagtaccgtgaacaggctcgaggtggaaacggacctaaccggggcggacgaggaggtcagtctcgattttcgatccccgtttcccccgaacctctcccgcttggcttgttcggcaatttcctgaatctggggaaccgtcttggcgcatggaaaactgaacaagagatactttgatttctgcttcgataggtcgaggcgggtttaacaatgctgatcgcggcggtcgaggtggagcaggagccggtcgaggtggtggtggtggtggtggtcgaggcggtcccggacgaggaggacccggtcgtggcggtcgaggcagaggtcaatagaccgcttcacgaaaagcagcttgaaatcgtgaagaggtttgcaagagggacaaggaagaggtccgtccgttcaaatcgttcggtcggacccatgtatagatacgataatcaactggggtcacgctcccggtcgggagatgaacacaaaaagtaccaaaacggctgtcgaggctcttggccgatctcaagcgggtcacactgtctcacgttgctatagctcccatttaacctggtccgatatgttttttgcgattcttttacgactacactcatgttcgataggcggacggtgctatagtgtaatcgtcctcggactcgttgtcgaatcagtccgacttttccgacttgtctgaccctttacacacattatcctttggcaacgagcgcttcgagcgacctttctcatcgagggtgcccgtacgcggtcgtctaccttgaggaacgtcggacattcaaggtaccgggctgagatgcgctcaaagttcaagtcggcctgtggtagtgactcggcgaaatcggtcacctgggaggttgaaagcgtcaggacttgcattgcattggtgcgttgcttgggagatgtctagaacccacggactgcttccatgcgattgtttccggcctagccatgagctcgggccagttttcatttggatctttcgctactgtcagacagcggcaggtactattcgcacagcattgaatctcgactacttgcccaggtctcgatcatatgaaagggtatatcatgtcctcgtaaatcatgctttgcaaatgactatacagttgacatctaatcgagagtataacgcgatgttgctacagttttccgatcctgacggtttgggccgcgagtcgcgccgcccccttctgtttgatcctatctttcttcttttccgctgtgtccgcttgtttggcctgcttgtcggcgcgtttctgtagaagcgtgtctctgttaatgtcccatgcctcgacagacgctcgagggtctcttacctttgcaccgtgtttgagcgcggtactaggtgcgcacaaggctatatcagcaactgctatcatcagcgaataccaacatcgacccacatcatgctagcggcctactctcacatcgaaaaggtcgcttcagcgcgcgtcgtgtcagatcggatagaatggtactcactcttccgcatttcatcgtgtcaaattcgtcgagaccggacgagtccttgaccatgaaacgatgctgcgaattttccggcatcttcccttgtagcatgcttcgtaaaaatgtcttttggccagcggtcgccggtttttgacgccaggatgcccagcggtagagtctggaaaggcggagagttaatgccgatacgatagttatcgttgcgtctgacttgctgtgatatgacggtctttggcacgttcctctctaccagcttgtcagccatcgccatggcctgcctgaactgtattgcggacccggccacttgcaaaagaccgtatggcgacttgttcttgcgcatttccctcatctccttgggaagctgtgccgcaaatcggacgagatacctgccgccttccttgatgaccgagaagtagccatttcctgtaaggagaaattccctgagcggtccgaggcatacgtgagcagttgggagaccctagcctcacccatcgcttcaactacgtatttgtcatcgccacaattcacctaggaccggcggatctggtcaacatcgttcagctaaccgcacgtgctgttggtctcgcctcacccatgcatatctgcttttaaagcttttcgtcttgtcaagttcggattgctctcgaaatcggaacggatcgtcatcgtcctcataagtaatggttcctgatagagcctcttgcttggccagctcttccgcttccaacgctttctcttcttgatatgcttctcctcggattctgagttgcgcgaccgtttgatctggcgcggcacagaatgatatttcgtcagctcgttggttccgccgcacttccagatgggtttcatgacctaccttccacgtcagcatcgatcgggtctagaccgaacagtgtaggcgccgagatgagtccgtcgacattggtggtgttatcgaccatgtcgatgatcctgcagtcttcctttccaggagaattccgaagaccccgcccgatctagagcatggcagagaacttttattctgcacgacttgtcgccatattgtgaccgtgtcccagctcaccatttgactgaataaattcctagatttggtaggccgggcgatgacgatcgtgtcaatgtttggaatgtccgtcccctctgtcaagatctcgcctgagcgccagggcaaggcctcactatcagccaaaaaaaggcaccatctcgcaaccgtgccagacgctgatcacccacaattgacaagtacaggaaactcctgcgctttgaagctttctatgagcgctttccgatcccgatctgccgtctttgacgagacccatcgagcgtcgatcccacgggacctgaacatctgggtcagatcttctacgtgtgcgaggtcgacacagaagaccaaggtagatttccgatcggctgtcctcgaagcgtgctcagcttcctgtgccctgtctttcttccgcgtcatactaaacccgcgagggttcacccacctgcccgatccaaccacgatctgacgaccaattcgttggtctcctccgtattgaccttgtcgctcagctttgtagcgatgaaatccccggtccgttcactgatggccacgtccgccaatcgcaggtccgtcttgaccgtggtgaacctggccggggcgagccatcccgcctggagcatatcccagacgtcttgatggtacacgatctcgtcaaagacgagcgagagggcgagttggtcgtgacgtgaaaaggtggctgtgaaacctagaatcgtagcttgctgtcgaagagcatcgtccgccggcgcaacaagtgatgtaggggtccgagacgcctcgtcatctttcgatgtgaccttggtcttggtgttcttgtctcccactgcgttattgaagtactgcaacaatttcaagtacctatcgccatgcactcgcttcatcagccgctgccggatccttggtgtaccttcctggttctagcgcgctcacgaaggtgctgcagcgtgatgcgcctcgtccacgatgaccgcacagaacctggtcggatcgtacctctccaacctagatcccttcaacgagtgatacgtcgctaccgtcctgcccgtccgacgaatgcggcgcgatttcacagttgtgagtgtatcagcgctggcccgtctgcgcctgatgagattcccttgggagcttttcgacgatgaccgactcacacgtcggcgaacccgctccccttgtttgtaccctgttcgagctcgacccggtattcggggaacgtccttcgtatggtcgacattgcctgtctagcgagttcgatggatccgacgaggatgaggacttggttggccttctgccctgtgacggtcggatgacgttgcgctcgcgcgcggaggagggggatcaggttggtacttgatttgatcaagtagcgggtagatcggaaacgtgagggggtgaacgcaatttcgatggtatatatcagtcccaactcgtacaggtagaatcaactcatgaggaccgccgaacgatgaagcatattggagaagagacgacggatgcacgtctcgacgctcacaacatgacggtctttccgcttcctgtcgggctgctcacgccgatcctatcgacccctctatcgagggccgacatgcaagcgtgtatgacctcgacttggtacggtctcaaatagtcgggaaggccgtactgctgcgcaagttccgccacgtcggcggggagagaggtggaaggtcgtcggacttggacttcttcttgatcggggtcgacggcggcgggtccttgatcgagctcttccgtgtcttcttcgtggcgctctgccagggctgtataccatctccgaccatgtaaaggaaaggaagctaaaatcttgttcgaaagatgtcctccgatgagaccgttaccaccgaacgtcgacctggaaaagacggtcccgatcgaccttttgatcgtgatcgttcgtgcgacatgttgccgtgaagttgctatcagtctttgagccatagctcgttcgatctttgctcgatccgggtcggatcaagtctcatcggtagctttgagagtattcctcctgcttgattgctgcactttgacgtaacaggtatactcgatgatgaaatagggttgcaatcaagacaatgtgactttgttgataaagtcagatgtcactgctgtcctcctcgactttgacctttccctggatttgcgcgcgaaatcagagttttggttccgaaaaagagaaatatccaaaatgaatgcatcccacatccagctgcttgctaccttgcctgctatctatacaagctatacaacagggtagcagcgacaccccctgcttagcagccacctaggacgttcgccagctgtgttcaaactgtcattacaatgtcttcagacttgggcaaaccaacagtaccgctgcctcccgtcgaggccgctccagcaccggccgcacccgtacccgtaaaaccggtcaaacctgcacctggccctaccccggccgccctcaaagcgctcgaacataccggtctacccccctcactcctccgatggaaacccaagctcccttccaggaattggtccatcttcttgacgatcgtcgggaccgtctcttacgcgtactattacgaccgcaaggagtgcgccaggctgaaaaaggagtacgcagatagggtgaggtacttgtctcagcaggagatcgagggtggacctctaggctacggacgcaaggtgacggtgtatgcggccaagtggccagaggatgacgagtgggagcgaggtttacagtactttaagcggtatatcaaggcgagtcccggtcccgtcccatcctgtccatcctctggctgtcaagagtccgtgctgatgccagcgtcgcattccctacggtgcagcccgtcctcgtcgccgccgctatcgattatgacatggtatcctgtcctcaatacggtgccctgacccgtcatatctcggaccatatcctcaccgaacgccggcgcgagctctctgccaagtacaacctctctccccctctcgaaccccccgtgttcgacatcatggccggcgctcccggtcagctctcacacgaggaacgcgaacgtcgtcgggtgcagggcggcgcgatcatcatcggtcgacatacgctcaaagagtacatgcgagggttgcatgacgggtacatgaacgggatcaagcgggaagagagggaaaagacggtcgagcgcgttatcgagggggacggcgtgttcgagacgagacaagagctcgaggccaagaacctcgaagcggaggaggcggcgaggaatatgatgatgatggggggtgagagcgctgcggttcctcccgtcaacaccaaccctgtcaacctctcggccatgtcgttcatgaaccgacccatggtccctacctcgtcacccaccccatccgcgccagaagcaccgcaggtcgacccagagaccctcctgccggagcattcaaacctgcctccgtctcccttgcctgaacaacctagcatgctcctcgtcccctgggtgaaccatctcggtttcaagcaggtcccttacatgatctgggacctctttaccgagaggtacaagtacaagatcggtggagaggccggtctccgcttgatctttggcgagaagcgcgagtttgtcggcaaggacgacgtctccagcaacggtggtggtggtgggatcggacaagaaaagatgctcgaggacatggccgtcgattcggcaccctcgacgagctcgacggcggggcaatcgagcgacctcgatttcgatgtcgagtccgagacgtactacaaaaaggcgttcaacgagacacacgcccggattcagaagaatagggaatcgtactactcggagctcaagaccaggcttgccacggcccgggagttggctacgggcgcacgggaagctacggccgacgagcaggcccgaccgcccgctaccgaggccgatctcaggcaggagcgattgaagcgcgaagtcaggtggatgaacgaggagcaagggtacgagattgtcaagaagggtcagccagtgacctgggacggcaagtggaacggctggttgaacgtgtatggcgacatccctgccgagaattacccggcattgcccatcgagcacaaggagccagaagccgttgtataaacagaccaaagtgtgacacatgacatatccacaattcacatcgcaaccgtacagatacaagagaagcgggcaggtccgttagagacgggcacgagatggcgccgatgcttccgcgaaagcgagacggagagatcctgctctccgtgtacatcttgctaacgacctatcgtccctcggttgatacctgcctctggatcacctgagcggactgtccatgtcggtatgatgtcgcccttcctgcttcttgacctcgcccatcgtccgctcctcgtcactctcgtcgtcagcctcggcgagatccgtcaagccgatactctcctctccaaaggacgagtacagcgtgttgttttgttgtcgatacagcgacgaacggcgaccgtgacccgctgcgagggggcttccgtcggccgaataactcgtcacgccgctgccgccagcccagaggggcgagttgacgtcgtttgacagcctacccgacattgacatccgggggtctgtgggaatcgaccgcgtcaacgatgctcgcatgtggcgaggctgagcgtgcaactcactcatcatgccagtctccaatgctgaatggccgccgccctttggctgctccggttccctcgacaggttcaacagatagacgcccatgaagatgatcaggaagccgcaaatcaaagagacggtcttgccggcatcggtcgtgttgaacccctgaaagagaatggcactggcgatgatggtggacgtcgtgaaaaagacgtaatagatcgggttgacgctgcgcaagcatagagatctgtcaacgatcggtatcgatggcggatctcgcattgacttacacgttggttgaaaacgtgtccaacgccttgttgaaataattctattcgtaacaatcccatctattagctactctggcggtcgatcggaggcgggattggtggtcacccaccatctgaaccaagatgcaacccaacacggtcagaccgaaaaggtaagtcgaagcgtgcgtcaactgattgttcccagcgatcgtgagtttcagggcgattccgaacgcctgcgtcaggatgtcctcgagcccggtcagtcccgccgcgagggtcatgcgatacacggccggggacccaccttgatggccatgaccgagacacttcctacgagcgagcagatagacaggtagaccatgggatccttgggaccgtatttggggacgacgcggtagaccatgtatgtcgaaaagatagccacgcacgccaggtagaagagaaaccctgtcgcccacgactccttttcaacaaagcccttctacgaaaacctcacctgaactcacctggctgtgtcgcatagttgagaatctcgtcgacggaattgacctctgggtcagcgggagcgtgtaggatgatgatgaccgatccgatctatcgagcgggtctctcagctcgctgtgtgatgtttcgttatcgacagacgacgttgttccgacgtaccaggcacgaagcacatccacagacgcccaatttgcccaacttttcgtccaacaggatcgacgccaagatggctctgtccccacgtacatcgagtcagcccaacgacattggctcactccagaccgaaccccgtctcacccaatgatgaccgataaggctccgagcggggtgaccagaatggcaggtgcgaatgtgtatgctgcgaaattggccactatcgaggcgtggttgaatgaacgtttttttcatcagccatgcccttgtctctctttaactcgagtgaatactcgtctgcttaccctccccgacgatcactaaaatcgccataccccagagtaagaaaacaaatcagcttgacgcctcgacatgttccgattttgcggtgtaaatcctcactcgtcaccatcccggtccaccagatcgggttcttcaggtaagccaggtcgtccgctgtccacaccacgacgaggacccagaataaccaagaattgaacaggaataagccatctcccactcgtcgtccacagacgatatgatcggagtaatgtcgacaattcgcttgcttacaggcgttcttttgtccttgataacctcgtttcgccgcatcgtttagtccctgtgataagcaccgagccggtcaggttcatgctcgatgttagagaataccgaggatcctcacttttttggtgatgatgaagctcgaactatatcgtgacatgttcggaacgacatcgaggtcgaggttgaagtcgaccgttaggggtggattcggcaggggaaacaggggtggggcaggtgtgtgagcggtccactgcgactacagcatgggtcgagtcccgagaacgtcacgatagtccacacgcagcagaccggggatcaaactcgcccactcgcaattctgaacggaattcggctcctgaggttcgagtttgaagccgatgtttctctttccaccatcgaccatccatccgcaatcctgtcgccttcgccgtccgaaactcgaccaggctcccgctcgcctactccaggctacacagcgactcacccgatgcagaccgttccaccgatagccaaacctaatccgatatacttgtcttccaccatcttacttgttcgtcgtccttttgtaagtgtgactgcaagtctcggtaccgttgtcctcggggtttgttcgggatgagatctggagtcccgatggatgaggctatgcttttccagaggtcaatgtttactcgctgagatgacagagatggtctccggaacgcctaatgatctagtgaggttgagcagtcgaaaactcgtaggcgtttgtcttgccaagtgttcaaggggtgtgggcatcaatggaagagccaaggctttggtcctttcctcagcgctctacttacacttacttgtctggataaagcttccgcccaacgagacatatccattcatccaggcgcgtcggagagcggcaacgtagacaccaagacgcgcttgaccccccttccactcccccttgacctcgctctcgtttctcctggctggtctcgatgagatgtcacaaaagtcgcaggagccctactcgaccgagaatacatcccagtacgccggtaagagtgagcgaaataccattatgattccccatctgtcggcccgatacatatccgtacactcccgctctcgacgctcacacgacgatcctcatcccgcgtctcatcatgataaactcgatgcccaacccctttcccctcgcccgtgcatcgatctccaactcgtccaactcgctcttaatcaaccgcatgatcccgccattaccaatcttcccagacggatccgggcgtaaaggttgtttcacgtggatgatgtacaccttgagaccctcaagtgggagcgtatgaggatctcgcgaggtccgtacgcaggcggctaggcggaccagttcggcgtagagcgattgaggttgcaagtggccgaacatcaggtgacatggtcgatcagacgcgtaggagcattcgatctggcgcacgcaacacgactctcgaatcagtcgtgttggtcgtggctcggggattttcgttatctcgagggctcacaaagacggctcccaatcgtccctcgtcccatcttaccgcagcttcccgccagaccttgatattcacgtcgtccgcctcgtccacgctaacgttctcgtcgatcgtgctctctacgtctccccagaacaagatctctggtccgtccacgggccgaaccgaatttgattgcactgccgagctcgacgtggaagctactgggaacgaatccgcactgatgaagaacgccgacgattcgtacgttcctctactagtgtccccgtgcaggaccggcatgtgaagactgctcagccctaatcgtttcgaagcgtctttctgcgagaggcccgaaatcggcagacgttgatattggtgagatgatggcatactggaagagaggaagacaggtcagggctgtacgcacagatggatgacgagaggtgatcaggtaccaaggcggactcacgggcagtattgaattccaataccttccaacagggggtatgcttcacgagcgggttcgtacatgccccctctcgcttttgattcgcttccactttggttgacgctcctcgacgtgtccttctctgactctccattgctctgcgtctgcgtgacagcgtcaagtaacccgacgagacggtccttgaccccgctcaacccggcggacggttctggattcttgggaggtattgtctgggttgcccattgacccagctcgggccatacctcgccatcgtacactgtagagatcttgtccaggacgtctctttgcgcatagacttgcacgcggacgtgttcatgggagggcgatgagccggggggatacggcggcaggttccggggcggtaaagaacccgttgcaaggaccatggcgaggatgtgatcaaagtgtgcatgcgtaatgagttgacatctgcgagatcatcccggtacacataatcagccgaggcaaccgataagctcgcacgcgacactcacgcgagcaggctaaagaaccatccggctctcagtaaaggggacgtgcagtcctctggccattcgatccccggaagcatggaccgttcctcgatcagaggcatatcatcttcttccgaccctgttactaccccaagagatctgagcgtgaccttgtcgtatgttccatctgcgacccgtactatcgtcgggaactttccggcgtggcccgagttgttcggtgtcgtttctggggtatccggtagggcatggagaggaaggtcgaacgtcgaagggtgagatgagcttgtcatttgaactcgttctcgaagagccgtattgattgccccttgttgtaataacgagcacaaagctcccattcctgagcctatccccaggcatgtaaacaaaatgagagacagaacacaaaggcgggcgctggtagccgacgatcactcacctccctccaggccgacccagccatctttccaactcgtctcatatggcttgagaatgtaacccgacaattcagtctccataggtccgcctgactgacccaggatgaccatctcgaatgctagcggggaagtcgaacgaggcatgttgtcgaggtggcttgctcagtcgatcgattccgtttcggcgtgcgttaggccatagataaggcgataggcgtacagagactgaccgcccaatactccaatgacctttggaactttagtatatgcgcgatcatacgtcgacagtcctgggtatcgacaaatatcgattgtgcctcgacgcagggaggtacgatttatcgattgcgcaacgacgtcatcaaactacttccgccgccggtgtttgttgcgtcgagaggacttgaaagctcgtcctgcgagcttgaatgatggcatgaagacggcataatgagctatcgtataatctcgcttgggaatatttgatcctatcaggtcacacctgatgaccttgcctgtagtctgcagtcaccaggttgactttgacctaaacgggcaaagtgatgaggattgaccttttgaccttctagaatagctttgcacccgtatatcaggggcgctcgctcattaattgaatatacttccgatctcccctcgctcgccggggatgttctgatattggaacctctcaagactggagccgagagcctggcctgctttacccaccggcgcaaattgcgaaacaagggtacaattcatcttgcttgaaaatcggacatagagttgtagattgtaaaaaatatgatagatctctctgcgagctagagaatctgatacattcgcgtagctctcgagttcaggctaaattatgaaacattgcgagaggattttgctctgcatttcggtttacttttcgattcgacaagtttggatttgttctttctcaccgagtaatcgcacggattaccgtgtctcaagccagagtgacagtgtgattgccgagagtcagatccaagttccaggcactgatggtctgcttctcggaatcgtaaaactggttggcggcggcctgtccgtcgaggctgacggtcttgttctcggtctgaccggcgaagacgaccagatcgacgatgctagggcctgtgtatccaaaggtacctccgatggtcaaggtgtcgttgttgaactccatggtaacatcggaatagttgtcgccgacatcgaggctgataccgtcatcaagacggagctcgccggtggcctgaccagtggcgttgggagcgacaacaatgtggaagggaagctgtcggttctgctcggtggtgttggctgcaccagtcctgagaggaatgatggaacctccaaggatgtggagaggaatggtctcgtagccgacatcgtcaacagtgatctcgctacccgttccctgcaccggggtaaggtcgaagaagtcatagtaggtggcattaggtacgtagaaggtgacgctggtcgagttttcagccacaacgggagagaccatgagcgcgggtccaaagtagaattggtgctcgatgctgatggtgttggcatcttcggggtgtacccaggagagaggccacaaggcaggggttccgtcggtgtgggtcttgtgaatgaacgtgtagatgtaatccaagagcctaagacgcgtctcaacagcggcctttccagcgacagttgacaaggggtatcgatagaattcttggccaatgctgctgatctcgttgtggttcctgtaaaaggtgttgaaagctccgagccaggcccatcgcgccaaaagagtctcggtacagtttccaccgaaaccaccggtgtcggcaccgacaacaggtcctccgaatccggcgaacaagaggttctgacggatcacctggatgtactgttcccaagtagaggtcgagtcgccgagccagttaccgttgtgagtacccgttccactgaaactgcttcgagcgataataaacggtttcttgccggggttcctcgccagctcggcttcacgggtcacgagtccatgagaagcaccgtacaagttatgctcgtcgtaggctcgggctccgttggcctggacgacgtcggttcgaacggtgaaatcgctaatgttcttcagacccgagccgtcagcgttctgcatcgaaggcgcggctcgtcggtcctgaattcggctgtaaaggaaaagcatacaagcgcgagttagcgctggctcgaacgaggcatcgtaatcgtacccctccgcctgacgacttactaaggtgggtacaaccattgggaatccagaccggggttgacagtgtccgccatcgtttcgttcgactcttgcgcttgcctagcgacgtgacgttgcgagctggagatgacgttcctcttggtcatagaagagttgttgccattctcgaagggggtagacacgttcatgccagcagtgaagcgctcgaagccttcgacggtcgagggaaggaccctaggcgcaggcctgacgggagggacctctcgctcggccgagatgcgctgtacgttggcctcgaggtagggtaggaacgaggcaggttcgttcctgtaaatgagagatagtgttgcaaacgatggttcagttacgttccatcataattccgtatggtcggcgagccaccggcgcaggctcacatgtcaatccagactcccgaaatattgacaccattctccgggtcaaagaatgcgaccatctcgtcctacatccggcggcaaaggtgatacgggtcagttcttccttgtagatagacacagcgttgaagtatgaactcacggtccaccactgacgagcgctctcagcagtaaagtcagggaaagccgtaggtccgggccatacaacgccttcgtaggtcttgttgttatcttccgggtccttgtagaagaccccctggcggtatccgttctgaagcgtcgtgtagtttgaaacgtcgtcctcggtccgaccagtcgcgacggcaggatccaccatcatgatcaggtgttgacctcgcgcggtgagcgtgtcaacaaagtattgtaccttggcgagctcgaatcggttggggtccaaggtcatgatccatcgacggaacctatgtggccgagtttcagagccacgcggtcagctttctggcagagtcattcagagctcgacggcgattacggacatatagtcgatatccaaccactggatttcgaggggaataccagcagcgctgtactacagacgcgcatcacgaaacaaaggtcagttttgttccactcggggaaaacaggcttgctgacatcctagaatcaaactcacattggcgacggtctcggctgcttctacgatatcgttggttccgtatcggcattgatggaaaccgagactccaataagggacctcggcggggtaacctatcgtgtagctcggatggtcagccttcgccatcaatcgcttgcggtgaggtcagactgaccaatcgcctgaacgtattgcttggaagcctcggaaggcgtcggtccagcgaagaagtagagatcaaagattcctccgatcacgttatattccaagtatttcccgttctccgggaacttgacgtccatcccgttcgagttgagtaggaagacggcgtgtgccgacgggttctctccggtgatctggttaatgtaaactgggtgtgcgccgtacaaattggtgtaagtcggtaaaccatagctacaacgtcgagcatgccatcagtcccgccgtcggtcgcatgctagagcctcgaagaatgccactcacgcgtccctggcccagagggtacgggtgtagttgtccatctcgatcggcaagctatggtgaatcgctggtcagttcgatcgaggacattcaaaccaccatcctacactaaactgacctaaagttgtcgttgtgctgaccgagtccctggatgtgcgagttttcgggcaacgaagtcctcaaccggatgtactgttcctcaaagatcagagcggcgcccgaggtgttgaacaagacggcaccgtcatccttcctagagatggcgaaagagaaagggttctcttcccagtcaaagacgaggttgctcgtctcgttggtcgcaccgccagtaccgtcttcgctgatcggggcccaagctccgatggcgtagtcgacctgagtaggcacgatgtgggccttgccctcggaatccctaatctggactcggagacggtcttcactttcaaacctgaccttgaggtcgagcgtgttgtagtcgggaccgtaggcggaacagttaccgatgagctgaagcactccgtcgactccgccttgaatgacgttggccgaggtcaactggtatccctgacaagcctcaacatcgccggtgtgctgcacgggcgacgggatgttgatgatggcagggtctgaggagaccggagcagtctcggcgaccgtttcggtctcgttgctttgttcttgacgaccttgaagtcgtccgctatcgccaagctggtagagcgggctcgcggttgcgaacccggcgatggccagagtggccaaagaggcagagatggacttcattgctgaggtccgttttctgccggtattatgatgtgaggtagcgctgtgaatcagacaaggcggtcggacggaaagcagactgtgctccaggcaggaagaggtcggtatatatccctggatcgaatcgactttttcccttcgtcatcatcgtcgtcggtctcaccgctttcgtcgttcgtcgtccgccccggtcgtctttgcgtcactcgacggtgagacttcggatgactttcgggcgcttgtgccgcatgactgacaattgacgaccccaactttttcttcttctttgctttcgaacccccgaatggtggtcgtgcgggctcggcacacggcgctccaatgcactcgatggaacaagcagcctagaagcatgtgagatcgtggagacgacgtcgacacctacacgcccgagcttgcgggtcctggggcgacgagatctggaggtccgcgaccggaggacgatcgatgcgcgcggcgttctcccggccgcgaggaagaggaaggatcatgtgatgcgcttcgtttgacgaggcgagccgccgctcttcaccgtcgggtttgtcttggaagtctcacccggtcaactcggcgcccatgatgttgagaacgggcatgtttctccgtgcgtcgtagaataggaataaagaaagcctcttgccggagatccgatgacccctcgaggagttgcaaaacgtcatccttgaagcctcatgatcggaagctagcggatcttactaccataggctgagcgttcacagcttggcggtgatgaagccttgtgcgcctcacgccagaaagtcggcagaaccatagagtagccactatgctgctcggagcaaatagagggctaagccagcgaaagtagcgaattgcatcaagcgtagtttcacggagagcagacgtctcgaagtatatcaccattatgcgtttcatttctacattctgctcttccttgccttcccgttcaaacgagatgcgatacagtcttttcaaattgtctcatgcgagctacattattgcttcaccctcttgtccagcttagtagggagcaccactaaatttccgcagtcaccagtcacaattcagtgatcttgcaaacgctatcgaagcgcatacagcaaactcacccgttgcagtggatcatctgagcactgacgtaactcgagtccgagctggccaagaacacgacacaagtggcgacctcgacgggttgctacatgccggaaaagtagacacatgatcagcgagcatccagatcctcatgaccgatattactgactccggcccttccgatcgaagtggtgacaccgaacgacttcatggactcttcacccatggtagcgacgaccaagggggtcaagataggtccaggacactgcacaggtaacgaacagatgcgagtcgtcagaaggtgcaaccttgcgtaggagaccaccaccgagagacgtacaacggcgttgactcgaatacccttgtccttgacgagctggttcgacagggctcgggtgaaaccaacgatggctgggagcgggacgtgtcggtcagcgggttcaacaacgaggaaggagatgtataccagcctacttaccgcccttggtactggtgtagtcgaccaacttggggtggccaacaaaggctacaagaagagcataccacactgagcacccgaaatctccatggtctagatttctgtcagcgccgttgcttacggttgatggacgcgttgttgatgatgctggatccccaaggcatcatggggctggcgatggaagagaaggtttggtcagtccgtctgctcaaagatgagcccgagtcgtacgtcgacttacagaagcatcttggtcaatcggaaaaaggcgtggctggatcgtaggaagcgaaacatctacgtcagcgtcgaatctccacctctgatctcttccagagcacgaaactcacatgttggtgtcaaacacgtgggtccactggtcgtcggccagatcggtcaggctctcgacctcttgctgggttgcgtggttgttaaacagagtgtcaactcgacctccaaagtacgacttggccttctcggcgagcttttcaacctcggcgaacttgctcaggtcagcagcgatgaactcgaacttggtagagggcgagttcttgttgaggaatttggtcaagttctgtacgtctttctcctccttttcgtggtggtgaaggagcaagttggctccctcgtacgcactgcaggtaaacgtacagtaggatacggtcggtcagcaaagcaggcatatgagaaaccctgcgatgactcacgcaagcacggcgaaagaagcgccgataccgctgtcggcaccggtgatgacaatgttcttgccctccaacttgccgacacccttgtacttgcgtccgtcagcgagaatgtcgaggacgggctcggcgtcgccggtcatgtcgtcctgaataccgggcttgacatcctgcatggactcgaccatcttgggctagagggcgattacgaagtcagcttcagcggagcataaattgctggactcaaacgggtgcatacctggaagcccggcctgaactgcttgggaacagaggaaggaatgttggacatggttgcgtgaggtctggtcttttgaggttggtcagggaagattgaagtctagaggtatgattaggaactatgacctgttcgatgatggatcagcgtcagtagacattcgaccctttatacaatttcgttgtaccgctgaccgagaatgatgagctgagccaaagtgctggctgacggcgacgacgacgacaaaacgacaacgactggaatgatcggaagcgaaaatgacgtcagcagcgggaatcatctcgagccctcagcacgaaacctgactgaatgggtttcgcacaacgcttgatgtccgtcagccatcaatcagatggctgggttcaccctggaatgggtaactcaaaggatgctcgtaatttccttactctgtgctgctgctcgtctccaaggtggtgctcatcatgggccatgggcgtcgtctgatcgaggtgtctatacggacatgtgatggcagccgtcagcagccaagcaccagagacgtccacgcgcaagccaccgtttccaagaccgcttttgacgggacgtcatcatattaggtcttcggattccccgacttcgaaagctgcttacctatctctgaatctccgagagagccacgcgcccaccaaaagctggcgaggcaaacaccggtgagaccaatccgagcaccacctcgactattgctggtgcctcggacattgtcctccttccaaaaggggacaaggttttgggaaagaagtcacccaagttcccacctggatggaccactcgcaagggatcctctgggcaagggaaacattggaatggatagacagagcagatagaagaaggagacgatccaagtaagtgcacaagcaagcgcagtcaaatgatgccaagataggagtaatagatcgacaagactgtgtttttagctgaatcagaggaatacaagtttttttatgagattatggagcttctgcacgggttagggcttcatcgaggtcgtgtgtaccgatatcgggttcgctctagccagcagtcatcagacctcgactcgtatagccattgcaaaccaacaccactcatgttcaattatgttaatggccgccaggtcggagaaatgacctccatatgtcgctacccttcagctagcggatcagcagttgagcctgtctacgttctgggactactcacatcggactgctattgatttgacacagggactttaccactgaacgagattcttactttcaaactagactctcttgaccgcgtgttgagacggtctgggcgttcgcatcagttgtaagcggtgccgacagggtctgctttgtgcccttcgcaacatatttttagtctgattgaaggtctcgcaggacagtttgcggggagtggactgagaaagacccccgaatggtgcatgaactcggctggctcggacgaaacagcgaggccgtggtctgatcgtggttcgtttcgacgtcagcacgtccactcgtatcctatatgcacaacacagcgattattggccaccttcctaggccgccccctttgcacaacgaatttattgttagacgctgagtttgcgatgcccaaaattatgcctggatctgcgaacgagaggctcgccagaaagtctctaagcactatttggctggtcgaaaaggatggtcccggcaagaaagcacgtttccaattacggggagcaataatcatgtgatgcaattacgtgcgtgtaattcaaggtcatgaacagcgttcgcctgtccagcctaatcggctaacccggtatgacagacgtgtggcaaatcagtttactgtaccagttccacgaaaccttatcgcgccgcaggtcaaagactgggctgttttggacatgaggcggtcttatctgtaggtaaatatggcttgcttgcgagtcgtctataatcttgtcctcaaagacgggtgactattggctgttacatatgagtctctatcaggtcgaactctactgacgaacagatgaccggaagtatattgagatcgtcggaagtaaatccgattgactaggaacgaggggtcgacgtgattctgagaagtcgacgagtttcattcaacccaggtccacaggatgatccaatgtagcaatgactgtctcgatcgcggtcttcgactacttgctacatcgctagaatcggccatacttaccccgtctcattatttcaatcggtcctaaacatggtcaagaacgtcaacgacgagcaggttgtgagtcctgcgcgtagatcgcgaagtcaaacggttggtccgtgaagcttacgatcacggctgtgaattgcttggccgtgatagaaagcgatcctgtacggcaatgcgcaacagaagactgtgagaccagagaggccgagaaagtcggagcctgccaagccttacgaggtaagttgatcgcgaccagtcgttactggtattcaagcctcagggctcacccgagtatcccttctgcatgatttacagcgacctacgaaacccggtgcgaacaaggccccggatggtgcttggactcatgatctcttccgaaactccctcgccgaccgtatcaacccgtcttcgggaggcaagcgagacctcctggcaggtcaacaacgtacgggaggtatggcgtctgacgatctccttcgacaacccgctcgaaccgaccagaatcatcgggcagcggtcggtggtgccggtgggaaacgtccggtcgagctcttggccggccctacgaggacaccttcgcgtacgctcggtggacccatccgaccggtagtacctagacaacaatctgcacaacgtggagccacgacccggggtccacgagaactcctcgcgtcggaagacgtttcgatgaggatggacgagcctgtcagacaggatactcgaatggcgagacaagacatgatcagctcgcccgctgcttcgtccatgaacattaggtcgagaccggttgaagtcaccgttcgggttgacggtctcgtttccggtacttccgagtctgatgtcaaggtgagtcacgctgcgcgattcatcatgcacgcaatcggtacatggactgatatcaaccgggacgaatttgacctcccactcagcacgccttttctcaacactttaccatcctttctgcgagtctcaccaccgatctggatcgtgccggtcgctccgcggccaaagacaccatctctgccgaaatcgttttccctacccgtattgaggccgaaaagatggtcaccaccttcgacgggatcatggcggacggtaacaagctggccgtctatattctcgaacctcctgcacccgtcgtcgggcccatcccggcgcagtcgcatcaaggattgaaactatctgagcggatgggcctttcttcgggttcgtcagccgggccgctgtccggtaggatcggagcaggttcgggtctggacaggagcggagggtccgagccgagggctgtcgagaagaagcgagagaatcgggggaacttgttgaaacacgccatgcgcggtgcgacaggtcgggaagtacagatgggacaggcagacttgttggaatctggcggtatcgggtaagacagcccactgcgagcgtcgtgattgccttaccgattagcaggcgctgatcatccttttccttgactttacagtaaaatgtactcggacaccatcctccagaccgacccttatgccacagtcataaccctcgaggaagagcaagaagctcgagccgtcgcccgtcaagaggctcgtgtacgggcgccgaatcagagacgcgacagggctcctcggggtagaggatcgctagcaaacaggttgggaggggagaggggtcagaaggctggtggtgggcggcaagttgggcaaagcttggcgagcaggttgtcctgagtgtcagacgaatgagggcacgaggagcctagcaaaaccgattacgaactgagagaagttgctataccatattgatgcgtttcagcgcgataagtcatttggtccgaccattgcttttttcctttacaacgtctttgttttcactgccattccagttttttcgtcacggactctgagcgggaaaccatgtgagtcattcagtcgactttggtctttttggcttccgagggtccatcctgtttgctctcgcccgccccagcctcaacgggttcttcctcgggagcgggacgtttggccgcctttgacaagaggggaaatactgtcagccgctgacgaaccaactacgccgggtcttgggaaacttgccggttgagctttagatgatgcgatagcattcccagattcatcgccctcggcgtattcatcttcctcttcatcgtcttcctccaattctttgggcgtagcctatatatgttgttaggtagaccgatcagctcgtgatggctacccctggtaaaagcgatgcacgtacattgtagaaagcagccagattggctttgtgattcttcttgacttcctcgtcgtcatcatcctcatcgtcatcgtcatcgtcatcgtcgtcgtcttcatcctcgtcggctatctcgtagtcgtcatcgtcctgtcccatcaacgcaaaacagtgttcaaaaccccatgcctgacatgctttagacggaaagctagcagctcacctctatgacgaccgggtcttcctctgcgcctgtggcggtatgccctgcagcctttgaatttccttcagcctggggagaggtatccgtatcattgtcctcagtgccttcagcctcggctttgcgagcggtcgctagctccgtggcgggctcgggcacgatatgctcagcagtctgtgtgatggcttcgtcttgcgtcttggctatgcgcgaagaacgggttcccttggtcagaactgtgacatctacagtcttcgagtattcgtactcacttgtatcactcatcctgtattgcttgtaactggaggattcgggaatcaagtgctccagagtgaacgtgtacccataacttagggtggatggcaaccagttgatgagctagcgagttcggggattcgggcatcgcgagtcacgtattcggaagcaaaatcgagtcgggtcgcaaggcaaaagtcgcgattcgtactacttgggagacttgtccagtctgaatacttcgttgtcattgagactcagagtcgctagcgtcacacaaaggaattgtcattcgaggctgatgctgtattctagagggtaggaggtggagatacagatcggagaagctcgtacggaacaaggggagacacaagacgcgaccactcaaccacggacgaactttcgggtagagcttgtgaagatgaaaatagttcaaagtccccgtcttggacagatctctttggtccatgatcagagctcccacaacctcgtaccatccctgactctgttggtcctcacacttgatcctagactcgtgtatttgagtaggattccagtgcttgtggtacgcctccatgacaaatgccagccgcatatgttcccttccaatcatagctagaatgtctctgaagcgccagagagccgtcataacctaagaggtcttcgcaggcataggtcttacccacttgctcacttcctgatcgccaagcgcatcgaacttcgggacgaacgcacgctgaagaaggtgagcctgcctggtcagctcgccgacagtgagaaaataagattgtgatgcacgcggcccgtcgagcaccaatcaatcccagtgcgaacatgttctgagacaagtctcgagcgaggctggaacgacttctgattcgggtcgggtgcgatcataccgatgatgcaaatgcaaatggtatgccgacctgtcgaggccagcaataatggcctcattctttacaaactatgcgacgctggcgggagcgctcgaattccttgtaggatccaccggtgacggcgtcgtctctttccgcctgagaatttcgacctgagaccgcgtcgcaatataagacatcagtggatgcttgtcatgtgcgctgtggtcttggactcgattactcacgtagttgccggggaaccaacccgtcctcccatccctcgtcctgcctctccaccaaccgagttctttcccacccatagctccctcttcgaacctctgcatgacggccacgatctcgtcccgcttcaaagccaactcgtgctcagccgtcggctcgaaggggaacaatgccctagcaaaagtgattggtccggtctgtttcccacccgcctgagcctggttcgtaggatccatcggtcgacccatcgagtccagcatgaccccgcctgccaccccgggtggcagggccgcccgacgtttctcctcttgcaatctcgtcaagagcctgatcagtttggtcatcaaccagggcaacccgatcgaactcaagaggaagaggagcagaggtttactgctcggtctcttcccgctcgccggtccgttgggcggggaaagaccttgatccttgggtccacctgctgcgcgacctatcttccaattccactcttcggcccaattcccgttcgcccctgctgcggatgaggaaaaggcggatcgatcgcccttgagccaggcgacgatccgtttcccgagcctgaggacagagaagacgcccaacacctgggcgaggtaggtctttaggcctcctagttgatcggcgactccgaccatggcgaaaaaggaagaatgcgtggcaatatacgtgctctcgaacaattgtgccagcgaggtgaacgccccgacgagggactccatgacggcgaacgctggggcggtggaattttgaatctggtgcgacagggtcggaggttgattgtatgggtcgttgccataggtagagtagcctcctccgtaacctcctccgtatcctcctcccatacgtgaataagctaggtagacagaatgtagtcgattaatcagaggccgttgcggaagtggaagaccacatagaacctcgactcacgcgagccgtatccaccgccataccctcctgctccgtatcctcctccgccgtacataccgccggtcattcctcctccgtatccaccatagcttccaccaccatagcttccaccaccatagcttccaccaccatagcttccaccatacccactcgacattgggttcattcgggaagcgtaggatgacggacccgtcatcgagttgttcgggttgtaacctgtgtcatcgttctgtcagccacgactccttgcccctagggtgttggatcgatcacacctcgcggctcaccgttcatggtcatatcgcccgatctatctggaagatcaggagctctatcggtagtcatggtcgtgttcccattgatcatctgatcttgaccgtcaaacgcgttcgtatgagaaggaccggcttctgcgttgccgttgccggtcgactcccaaggtttgggcggggcttggagcgttggagcagatgaggccattggattaccgattcggttgcaccagatagtgtggtgtagggtagaggagagtgtgttgcatagggtttgaagaaggaagagtagttgtgtgcatatagctagctaggtccaactacacctcgagagtgtttctcccggttaactcgcgcggtcaacgccggcgtgacaagcggcaaagaagcgacgctcgaccagaggaatcagacggacatgatcgacatcatgcatcatttacctgtgtatacaccttttcggatactagaaacagtcgacttgctactaggcctcttcttcaatatagaaggatggtcgtcaccaaaaagcaacctgccaaaggcaaaaaaagtcagtcatgcccgttctcggacacgacggcgccatctctgctcgtgcgagcgcccgtttcacgtcgactctctccaaactgactgtcccgtgcgctttacacgtatatgtagcatctaccagatcactggtcacgagagctccaccgactactactgcgtccaggacgacgaacaaattcaaaaagcccgccgacccagctgacgaggagagtgaaagtgatcgcgccggcgctcacagatccttaaaggaggcacccccgcgaagcaggtcgaccaggcagaagatggtcgctaaaccaattcgcgattcgacgtcttcgatcgacgagcacagcgatgcagacgatcaggaggaggaccaagacgagcctagtgtagaggaagagcaagaggacgactatcgtcctacatcaccgctgatcaagaaacagcatcctttggatggaccggccgctaggagaccgaaaccttccgttcgttacagtacgaccgcccgacagaccggccgtgtcgtgaacaaagccttgcatattcctcctcaaacccgagaaagtggtatcaaacgacctctccgacaggcgcagagcgataccgaggaagaagaagagcagcaagttgaacagagcagggcgcaaaggaggagaaagtgggttccgttcgcagaggccgtgacgacccaagagagccaggatgacgtccaagaaggagaagaagaagaagaagaagaggaggaggaggaggcggatgaggaggaagaatttcccagaccggaacagaccgggtaaagcaactgccatgtatatcgagtcgaaaggtatgccggctgacccgcaagctctggcagattgacggtgctgcaacaaagaatgctcggcaagtctcgactattccacgatcaacttttcccgctacagatatacaccacagacgttgattggcggtactaatgctcaactcgatcccatcttgtattcacatagacaactccaataagcagcaagcgaaacgtaatcaggaaaggaagcacattctggacgtggcgaagaagcaagcaatgcaagagatggagcgcgcactcaagggagagcaggggaagtcggtcggatggaatacgttgtgagttgcctggctcgcttactgtggcagctttcagcgctggtctattgagcacgtcttgtcctattgcaggatggaggagattggctcggctttgaaaacgatggaggtgatgctgcaggagatccgacaacagcaagaggaggatgtgttagggaaatctctggaccaggatctcaaggaatgcaatgcaagtcgtgttattatcgtgcacatcacgcaggcgatcttaatgtcgagacatgttgttgcaggacgctgtcggccctttcatcacaaagctgaagaagcacgtcaacaaagatttgggtaatcaagggctggtcatcagagataccggacttgccagtgagttacttctggccacatttctatcctggtctaatcagtcataacacacagtgaacaagctaccccgattgttggaaaaagcgcaaaagcgtgcagtgcagcagacgaaacacaagatgcggcagcaatatcagatcgcacaggtgagcgctagggctgagccgtccccacgttatctggctaatgtcgcttgctctccgtagcgaaatctgacggccaagaattacatcaagagcgttgctaagattatgggtgtcgatctgactccattccggaattgaccacgagtgtctagcgtcacatgatcacctaaagttgagcggaagcgaaagatctgggataaagcgtttagtgtctcaagaacattccttatgtcatttgctgtcggattatagaaaggcgatacacatgcgagtggtccagctggactatgccttgcgagtctatgatatgtacatatacaagtacctgtcctggtctttcggtgataagatacagcggcgagctccccggcggcagggagatcagttcttctgccatcgcaattgggtacgatctttgctcgctcggggcaagttggcatagatgtactgcggcgtatccggcgcagggtcagcacaacgtgcttctcgtcttgacaacctcgcatcaacttacattgatggcgttcttgacaccgttctcttgacggatcttctcaccgagcatggcagccctctcgatcatgacggtgtcacgagtcgcagaatgcaaggcttcggctaggtcgtcaacatccaaactgccgaccttgactccaactccaaggtgggtaactcgcgtagccgtaaagtcgcgaacaaaacacgagtcagcatggacacgatgggcgagctagactaggtaatactcatcagaagaattgatctccgaaccaaggcttgatcaaggtgggaagtccagctgtcaaagaggcccctacagtaccggcacctgcattgagggaaagggatagatgtgagctattgtatgggctgggcgagagcattgcacttgactcgcctccgtgatgcagggcagccttgatcttggggaacaaccatccatgagggaccttatccaccgggtaacaattatccgagtaactaggaggctcggacttttccttgctcggtgtagctgcacccttcgaggaccatcctttggcgatgatagcacggacgtccgctgaacaattgcacttgatggttagcaagccctgtagcacactccagaatccattgtacttgcccttgtcgacagccttgacgatgtttctggttaccatgtcgggatcaggtacggtaatggatccgaacccctgtagagatgggaaagatcagtcggcgtaatggcaagcgttgcatcagtcagacttgcaatgtaaacgagaggctttccgtctctctcggccttctgcatgaaatcatcgaggtcgtcgggaggggaccagtcattgtccgaattggctaggttccagtaaccagctgagaaacaacacattgtcagctatttgcacacgactttacgcggctgacaagatcactcactaatagcactgtatgggtattggcaagagagaaggggaattagtgaacgcttatagccatcattatgcttgtgtaagggagacccacatgtcctgcgaagatatgaagaaagccattcaaagatcagtacgcaaatacttatgcattgccacatcgattgacgacttacatcgtgccagtcaagaggcttaggaactgcaaggcaagatgaaattcaatatgacaacactgccatcgatcaatcaatttccacttaccaatgaagggagaaaagttgtacctatgggaaatgtcagacaaatgtcaggcggggtcgggcaggatctgaggttgccggtgactcacatgaaaggcactttcgtctgtgacagatgcgacatgtcggttgcaggcaagcctagcatattcttcctccacggattgatttgaggcgcggtcgctttccagatgatgttatcaaagatgacgtatgaggagtaattgaaaccaggtcccatttccacggcaggtaccatgaacgcgtgggggtatttgacggttcgagtccaaggcatggtgaacgctcgcatataggggatcttgagagcttccgcaatatgaataccggccatggtactagggctttcgatgagcacatcgacaccttggcacgactcccaagcatccttgagcagatcgtcaagccagctcttaaagttgccaagggactctttgaagaatcctggcgaaaacatggcgtggtcaaccgaaagcttcatgagcgctgctgggtcgcctccggcctgtctatgctcgattccgtatccttcgacccattccttaaattcgtctgatatggcatcacaaagttagccacttgtcctcgctggtttggatatcttccacagcttaccgtgggtaacaatcacacactggtgtccatctttcatcaggccgagagccaaggcgatgtacggctggatatcacctcgagacccaattgtcctatgatacgtcaagtgagctttcaggatcattgcgaaatcagcactgcaaaggcatgctcacaacatcgcaatccgacgggcggctaccttttgcctcgaaccgtagtcgttgactacggctggcaaatgtgccaaagcatgatcgggcacagaaatgttcatcgaatcctctggcgtgataccgaggacctcgatagttcgcatcctttctcgagtcttctgctgaagccgggattcatcgtcaaagtcgtccacgtcaagggtattcagtacagcagcgtcacgttcgcggctgttctcatcgtctgcctctcttccgttcaactccgggtgcttctcgtgcaactttgcgtgctcaacgaccagatcgttgatgcgtttcatggtctgcaaacagagtcccgcaacgttcagcgcttcacatcgtcacgttttggcgaggcggctagcgatcttaccttagctcgagcttggggactgaaaaagtcaaagtgcaagtcgtgacgtccagagaccttgacggccatgccacggaacttgaatcggaaagcatcgatgggttcagcccctttgatatcatgtattgggaatcgatactaagtcgcggttccagctgattagcatgatgatcgtattttgtatcgagtttgagctcaccttgatatcatggacgggaccggcacttttacgccagaagcagaggtacttttcggacagaatgatatgcccacggaagggtacggtcctgttgaggtagcatcgcttcatccaaacctgctcgtcggcattgattccaaagatggctttcgcaacacgagcattctgttgcttcttctcagatctgacccctcctggattaccgacacttttgttggtctcgggttcggaatcgctatcactgctatccgacgaatcagagtcggagtctgccccgtcgccatgtagcagtgcttgcttcttttgccttttgggtaatcgcttgggagccggtggattggtgaggacctgctcgggcaatcccgcaccgccttccacttctggcagacggaggagatcggattgtccgacttggaacactggcagaggtcgctccacaccttccttgtatcttcttcctgaatcatgagccttctggatggtctcgtgtagcttgtccgcaaaggcagctctctcgttcagcacgccgaacttgatattgacagcggtacgcaactccttctggtttccgtatcggaatttcatcgcacgggcgggtagaatggaggcgttcgaacttagatcttgaggatcctgagtgggaccctggaaggcaccctctccggtcctggcttcgctgtgagaagcgggcatacccaagttaccggtgttgctttctccctcgttggaatgaggaggaggtgccacggggacacggccgtcctgcactgtagcgtcagggttaccatagtctcgagacttggtggccgaagacttgtcggcgtcgcccgacttggcatcgttgtgcgagtttgacgattttttgaagtggcccatgaaacgctcgaggcccgacttgtggggttgttgctgtttctttgcgtcctcaaagtcctggtaggttgggttctcgggatgcattcgagtgaactcgctgttcctacgcgcacattcgttgccctggtcatcatccatgacgtcaacgtgaatactgatgagcctggcgaagtccatgtaatcatcagtgccagactctcgaatccggtccaggggcaacgagatcctgagcatctcccagccaccatcgtcctccaagaagacgccatcgcccgtcatcgtcggtgcgtcaggacggttgcccatcttcttttgccgcagttcgagcctgtgctggtaccgcctggcacgaccatgttggaacagggcagactcgaagtctctgtgccaatgcaaagcagattcttgggtgtcgacggtaaattcgaggaacttttctcccttgggcgatcggtaacgcagcttgatgtcgaaaggcttagccgggtcgagaggatagagctgatcgacagattcgactacagagcaggggaacaaggtgaggtgagtaaactgaacttgagaaagacggtattcgatgacagctcacgcaagattgatcgcaaaggcttgactcggccctcttcgtcggcactaggataggtagtgatcatctcagcgtcgagctccatccagacacgactcgtcttgttcgcaaagatagggttgtgcctgtgaatggtggcagctcccgtgtgcaagagcttgctggattcgtcgccgggcagcaacatcttgggtgggggcaagacggcgtggaacgtcaatcgatgggttgtcaagtggatgtttcccaagatcaagattccccggaagagacctcccttgcactcgacgatgaactcttcgggctcgtcgccctcgattagatcggcgatcgtgccaaactcctcgcacaaggcgtcaagcttttcctgcctgctgatcttgctcctgcgctccgtctcggcggcgacataggcttcagcctcttcgtcgttgaaagatcggacgctggcggcatcatccccgttctcttgcgcctcttccatggcgaaatctcgacggttggcatcggcaatctgcctcaaagtacggtcggtatcttgacggacttgagaaggcctgacctggctctcgcctggctgatcgccctctttggcggtcctcaacaacgcgctggggacgatcttcttctgcaaggtctccttgtcatcgtgcttgagactgtgcgaaatctcttcttccttggcgtcgatcctctccttcttgatctcggtggcccgttcttcaatttcatcggcatccgcgccctctcccaacgctttccgagcgcgcttcctgtcctcctcgaccgggtccataccgatatcgtcctcaccaaccccgtgttctcctgagaaattgttgacactgaggacggccagtcgatgcgacagcgcgctctggtcgacggtaggtttccggtaaaaggcggggagcacgatcttgccctcggtgggtttgaccgactcttcgatcgagctgctttgccgttgcatggggaaagcctgtaaaggacgtacccattctccagaagatcttcgttccccgtcgggtcgcttctcgatttccgcctcgccttccggtcggtcgaccgctcggccaccctgaggagtctcttcgtcttcccgttgctccttgtcagaggcctgttcttgctgtcgttgctcctgcgcggacgagtcgcgaacatcggtgttcctcctggtacggtaatgttccctgacccagacctcttgctcttccgggtgcatccctgccaccttgttggtctcgttcatcaacatcatgtcctcccggagacttcgccctccggtcgatgttgaagccgtgccgccggggacattggtcgatggaccggcagaggagacgagcggggccagaggtgtcgaattgttagtggtgggcacgccaccgctcgactcggtccgcgcgaaatgtctcaacgtgtcgataccatcctgctgctgggaggccgtttccagctccatcgaggcgtcggaaggttcccttcgttcggtcaggtgagtgggtcgttcgagatgctcgtaaagcttgccactgccggtacgctcggtttcgctatgagtcggttcagcgttgttgttgctgttgctaccgttagcctcccggtcctgctgataactatcgtcgtctcgggaacgtgaatcctctgaacgactgttttgctctagaggttgtgggggcgaacgatgatcgttgatatcgacctgtttcccattgtgattgtcttgaccggcagactttggaaagtctttggccctaaaagcgtccggttgaagtacgctaggtatcaccatcgtggatcggaggcgaaggcgagggtgacgactacgtcgggaggttggatgtcgtgtctattcccgacgagggtaggttgtactaatgaacggaacagatcgaatttcgccgatttgaagatgactgcgacttgacgctacggcttggcacggaggggggggaaggaacctggaacgggggtttccaagagatgttccggagggttcgtgatgacaaggagttggattgcgcgacaggcgatatgcttatgaaagacggttcggcagacacgaggaatggatgaggggtccttgtgagccaggtatatgagagccgcgctgcgtgaccgatgaagcaaaggcgaccgagggcgatctcgaaatcctccaaactcgctaggtctctcgatgtaacgaggatggatcgggaagactgaaccggtcgagtaggcggggttgagggtccggcggaggagcgggcacaatagtggctgaggccgacgtcgtctcgtggccagacagcgcgcgttgtcgggggatattttcgaaactttgatgagcaaaggtcgggtaccgctgagatgaggcggggatgacacggtcgaacaggtcaagcgggcagtctttgaacagggaaaggaattgtctacgtcgtcctcgctcggtcttgggaatcgacacgagatcgaggtggagtaccttgtgtatagggtattccattctcgctcggtcggtcgcaaccggtgtctacccagttggacgccgttgttgatgacgaacaacggagtggcgactggtttgggggtcaggggttcctgtaatcggaagcaaaaaagccaaaccggtgacggcccccaatcccatcgccctaacggctcccggcttacgacgccaccgacgcacgcaaacacggcgtctgacgcgtcattgcttcaagaagcgacatcaccgaccgcgaccgctcgaccgtctcgccccgttgctgcgaaagcaagtagcagagggatgggcgccaacgatgatcacccgtttctagctccccattctctcgagcgagcgagtgatgcaggtgaccgaccccttcgtttcagctttcgagcgggtgccgatgataaggaacggtcatcagacatcagatcaacgaatcaaatgatcacgcgccatggtcacggcaggtgacacaggctttcggtgggttgtacgtacaatcacatcttgccgccatgtttgtgagcaccgcaagtcgcagatgagttgtatcaaagcaggttgatgcaggaactttccgagatgaggagacggcggcagatttctgcgatgtcaaagtgagggagcgtggcgacctgactgtgaggacgaatgcactcgcactcgcctaggtaccatggccatcaacccgccacaatagctgcgcgatagcctcgatcggattgtctaatagacttaccccctactttgctgtaagagggagctttgacaacccttttttgactcgatgagagactttcgcatcagactttctgggcagaacatcgtatgcctcccgtcgtatccctttgtaccttttctgagctgtcaaacaccttcttccgaatgattgtgattgatcgcttatcctgatgccgcctcataaagccgggcagcgagaacaacgtttcgatggaccggtatcgaggcgtttccggctgcagagtcgtagtcagaagttcatgccttgtgacaagggaatcgtacacagattgcggcgactaagggccgcatcacgagtgagtgtagtcctgatgcacttttacctgcataacaacgccgggacttgtatcttggccgaacgaggggggactgacgcacagccttctgagaacatcatgtctttgattccttgtcttgatccatgttgctgaatatcgtatatcgctaaatgctgcatccaaccagttctcaaatgtagcgcaaaatggatcgggcacaagctgctgcctcaataggactcctgggcgcgacggcaggacaggagcgacagaaggccaagacgccgtacgccgacaacagaggctttccgggtctctgaacccacctgtcactgctatacgtgctcatgtgtcataaccgtgcccggagcgaatccaattgaagtctgaacgagaacgaggcgttctaactgtggagtttcttcatcgatatcgcatagactgaggaaaatatgcaggatgcgccatcgctaggaagtccgcaatcactactgaatatattgaaacatatataaatatagaatgttcgtgggatgagctcggtatatcactggcctgtgcgactgcgactatcgtcgcgtgtccagggcgcgacggtgcgaataagagagccacttgtcgtaaactttcatttataatttatcctatattgctaaaaaactcgcagcttctgaggtagaaagatagggtgaaggatggataggcaagatggaacatcacatcgtctacggaaatcttacccaaaaacgctgtgtgacaaaattccactcgccatcgttctttggatctctgggatctatggatctacgtcagctgattccgagacttacgtaaccggaatttccgtcggcgaggagcgttcaccttgcacctgcaccctggatctcgctagccagctagccatacctttgtccggccgtctacaaagctccaggccatactttcctgctcgccccatatcttgctacccacctcggaaataacccaaagtacgaatttccatctagaccttcttaccatgtctgctgtcgccaaacgagctcccgattacgatttgaaagacgccgctttgctggacctgctcgacaagcaccatgaagagctcaggtttgcaaaattctcgcccgatgtcggtgagccttctgttccagctctacttagatgaccccgtatgacgactgacgggtgggctgcagctttcaatctcggactggctctgagagaggcatttctggaaacttacggcgatgagtcgatcggtcgctcagctaagcctggtgtgaagaagggcctcggtaagcggttcgctaggagatttgctggattcatgcggactgagacattcacgatcaggtgttgtgatcgccatccgaaccttcaacggccatgaccttttcagctgcgtagcgggagctgctggcgccactggtgagttgattcgaaacccgtctctgtcgcacatgcatgtccgcaagctcattcggatgtgcctggataggacctgacaactgggtatgggctggtcggaaagaaaagctcgtcaagcagactggaaagagcagtttcctggtcggccgagtgtaagtccggtttatgaccggccccgatgtctccgcaacatgcttatgtccttgcgatagcctcgccgtacaaggtcgacagcctgaggagaagggataccccttccccgaatatgcctgtcacggtggtggtgagtatagatcatggtgctgggcgttcagagttgactcacaccgcactacaatgcaggctttcccatctggttgaagaacaacaccgcttgccccatcggcacgatcctggtcagcggactgccccaagccgaagatcatcaggttagcgaataattttcttgcttgctcccaatcgagactttgctgaagatcgacaaacctttccgttcttcacagctcattgtatgcctggatatgtatcaaaatggtatttctggtgccggagctaatacatctgttttctcgcataggccgacgttttggagaagttcttgcccactctcgagtagagctcggacaagccttgtttaccatcctccatgcgaaatatcttcatatacattcatcccgcaattccgatttgaacgtacaagcgctagcatgcaacgggtgtctatgcagaagctaacgctgcactgacaaagggcaactgtctttgcatgcggcaaggcgcaaggccctgttcagaaaagatgcggacgttgccgttgatgcaacggtcccgtagaatttcccgcagcagcctgccagagaggcccgcttacaaacgcctcatgaaagatcaagacccatttgccaaaagttagtttccaagcggacgcagtctctccatatctgaacaagtctatccaggcgcgccggtgagggctgttccttgactattcgcttctcgagtgattctgtgtttgggcagtgatgagcttctgcgtcggtcgcggtgatgtgacgaaagtatgacataccgattccccgcgtgactgcatcctgatagtcttttccgctgtaatcttcgatccacctcttgtatcgatttccttcgagaatgaacccctcgctcccgcgagcgatctttctttgaagatatagaccgacctcgccgtatcccaccaggcagctcagcaccgcgaccaccagctcgaggttgtccccccgatgaccgacgtctagtatgtactgagagtacgaaaagttggcgggggactcgctggacgtgagcatctcgtccatcgatatgccaaacgatttgcaaaactgtcaaaccgttcgatgtcaaccatcatgtctctcagcatcaacgtgtttttcgactcacctcgacgtgcatcccgctttcccgagcgatgtgcaaggatatctccgagaacgccttgatctcgtcaaaatcggtcgtcttggatgccgccagcgcgtgagctctagcatctacaaagagcgcggactgggtcaacgatatgcaccctttgatgaacatcagggcgacacgacatacagtgtcgcaggtaatgccaatcctgtatgatatagtgcctaaaacactcgatgggcaaggttccctttccgagctggacgatgaaggggtgtcgtacgtatccctgccattctttcggggtcgaacggagaaggtacgacatgaacggatgtgggttcaccgcggtcggcctgtgataacgagcaggacgatcagctctcttcgttcgtccggattgcgatctcaagatggccatctagggttctcacagaggcaacgtccgtgagacgctcatacactgatgattcaggggcccgtgaccttgccctttggcttcggccgtgaccagggcgtactgtacgtattcaataccttgaccgacggcctccttcactggaatcatgccaaactcgtcagcctctgtttgattgatgagacacagcttctcactccgagtatctacgcacgggatttaccgtgcccgacgttgctggcaatcgcggcgctgagcgtacaccctgttccgtgggtagatcgacttttcacagacggcgccacgaagagggtaacgtgcatcgtttcctcttgctcggacgaggtcaacaagacgtcgacgacgcatcggttcgctgatgacaagacctcgttgttcgcctcttctcttgtcgtggtcggtgaggcctgatcgggtggccctgactgtagcgtctcgcggtaagccgcgaggaattcgacaaaaccctcgtcctccaggtccgcctcgagactgttaccgttccatacgacgtccaaaagtagatcaggacccgacgtccctttcaagctcgccagctgttccttgaacgccgacctggtcaacgggacatgaccccccttgaccaagactccgcgttctccctctacccgacgaccatgcaggaagcgcaagatttccctgccgacatcgaccatgctccgtagatcatcgaccttgacgccgttatcctcctcggtctccttgatgaccctcccgagggcttcttttttgagcgcgatcgacggcccgtctgcgctggctcggagacagttggctatcatcccggcttccaaggcgttcggcgtgacgagccggcacaaggggaggaaatcgaacacgaggtcgtggatcgccgaggtagataacaaagaatgacgcgaggtggacacggagactgggtcgatgatcattggcggtaggaggggtagcgacttcagaccagtcgagtcggaagcggtggttgttgtgggcaaagtgtacctcgcagccaacgctccgatgagcgcttggatgatcggcgccgaggccaacattcccgtcttgatagctttcggagggagatcatccaccaagcacgtcaactgcgtcgcatcaaagtcagctccgaacctcacccgcccatcacctctctctctctctctcttgcgcccccttccccggctccatttcggcgacaaggcactcactcacctgcttggccacagcctcggtatccatctcccataccccttgcacccccaacgtattctgagcggtcaacgccgtgatgacgctcgtcccgaatgcacgatgagcttcgatcgtcttgaggtccgcttggatccctgctcctcctgaaggatcagacccggcgattgtcaagatcgtgggttggttggacatcctgtgtatttccccgctcgtgggttttccttgtcagaggttatcgtctcggtgtctcggaatcgacctggtcaaccgcggtatcaggtgtagggacgtcggatggacccgccggaggagtggtaaacttgatgacgttccggggatggacgagatgacgatccagctgcaagtgctgtgtggtccttgtcagggggatgagagggagcgtcgataacctgcttgaccagtaccttgccttgggaatatacactgcgggtttcatctgatgggtcctgtatggatagatgaggggtatatctaaatggggatcgagtcgcgagtccagtcggtctagtcgcaacgaagtaggttggttgttcggacgtttgaacggaacggagttgagcgatgtacggatcggaatcaaattatatttcataaagaggagagcggaagtatttgttcccgttcatcgcgacactcactgtactctgacgtacgtacccttcatcacctcgagatcgacgtcgagatcaggttaggagagatgtcggtcagatcgaaaacaagtcgcaaccaggcagcttcgtcggtttcttcctgactaccaaggtcgattgcgatgcagcgatcaagaggtatgcgttgccggtctcgtcgatctcgcggcgggttgattgccgctcggtgggaaaggcctgcacggtagacctctgctgggagatctcaaccaactcttggcgactgggagtttgtgcgaaccatggtcgggcagatagtttctgcctatttccagctccaatgctatccatccgggtgtagatctgcggcgacctaacagccactctgtagctctggttggtcatctcgatctcgatctccggtctttgacttcaaacgcgaataaccgagaacaagttggcaaaatcgggagttttgtttttttattagtcatctggcattcagccatgcgacagccctttcacataaccaacgactcgtacatatatacacaactccatcatcaaagcatcatcttatagcttatagtcgccttcatcatcatacccccctacgcatacttacatatctataatccataccaaagatgtccctcgaaatcccaggcaagatgcgcgccctcgtcgaggaccagtccgtaagcgccatcgtcgctggctccacagcacaacgtccgaccgactgaactccccccccccctctttgtctcctttctctacccggacgtttcagggaaagaccgcttcgatccaagagatctccgtgcccgagttggaggagaacgatatcctcgtcaaggtcgcttacgtcgctcagaaccctaccggtatgtcgtgcatcgcatcgcatcggggcgcgtcaatgtagccggtcaacttacacatcatttcccctctgtgcgacacccccaaactcactcagactggaagcacgcctcgatccctggtctctctgtccccggtgccgtcatcgggtgcgacttttccggtacggtcgtcaccatcccctcgatctgccccaaccccaacaagttgcaagtcggggacaaggtagccgggatggtccacggtgggaaattccctaccaagggttcgttcgcccagtacctccgggtaaactcggacgtcgtctggaaggtccccgagagcgtcggattgagggacgcccccgtctacggagtcggtttcatcaccgccgctggagtgagtctcgccccgactgccgacgtgcaaaaagtgggagacgagtctcggtgctgatcgtccggttttcccccttgataacatcgataggtcttgttcaggcgacagaagcacgaataccctcctgccaagatctcgggtgatcattgggtaagccacatttatcctctacatactcgatcacacgggactcatcgtctaaccctccctccgtgcttctagtacctggtctacggaggctctaccgccgtcggtatgttcgccgtccagctcgccaagctcctcggttacaaggtcatcgccacggccagtcccaagaactttgacttggtaaagtcgtacggagccgacgaggtcgtcgacgtgagtcccatcgccttgaccgccccccttcggtgaaaatcgatggttgcgatggcttaccaacgtcgcttgacacttccagtacaaggacgctgagcacgcttcggccgagatcaagaggatcaccggtaacaccttgtccatcggtctcgacaccatctctgaaaagggatccttcgggatcgcccttaacgggttctcggacgacaagtcgttgggtggggaacagcgcaaattgagcgccttgttgagcgccgacgagcccactcaaaagttggctaaagaggtcggcgtcgaggtggagaccatcttggcttacacctttatggggatcgtgagtcgagacgttacggtttccggatgagccggtcggcccgctgaccatgtcgacctctcgcaattctgtctactctcgctcggcagtcgttcgagttcttccctggaatgaccctgcccgtcatccccggtgaccgaggttagtgcccacattcgctcggcccctccccttcttccattcgagaatctttctcttaccctttgaaccgtgacgacacagaatggtacaacgacttcaacacccgagtcgccgagatgatcaccaagttcaacatcaagcccaaccctattcaggagaacggtactttggacagcatcctcgacggtttcgagctccaaaaggtgagtctctgcatacgacttgggctttccccggtcagctcccgatgctaatacgtctggggcgatcgtgatacagtccggcaaggtctccggaaccaagctcgtctacaagatcgaataggtcgtctcaatcagctgctaggagatttgtactgcattgcgaacaagtgaaaaaatgacatgaaaccaattgcgcaaaacgtgtcaatgaacgtctgacgcgcagatgctacattatagccgatcaattctggatggtccaggcggcagtgaacccttcgttcgtggcctcctctatgtttcgtcattaggcgatatctttcccggatgaacctacgacggaagtagaggtcccgagacggctcaatatgatcaaagacgagactgaaatggtattatgagggtcgatcggcgcgatactttacaacagtattgtcggaagatcaaacactaggcccgatctccatctgttcgggcgtcatcccgaattcagcgctcgatagcaccgctcagaaggggttgttctctttgctgccctcgccagcgttgtcttgcttgccgagcgcagaagggaacaaagtggtcggcttgcctctgggacgcagggtcgagatgtagagcccgatcagcatgggcttcgtcccgtctcggaacatgaacgactgacttcataaagtgcctttgcttcgagttggtcaacttggcggtgacgggcgacatgaggttgtcggtgggagaagcgaaaggaccgctgcgagacgatgcgtgtcgtgtcagtactaggtctatactttggctaccaggctttcaagtccaagtcgtggcgggcagatgaccttcaaaatgatctctgtaacatgctgctggatgtccccacggccccgcctctagactttcaggcagagagcctctccaccgagctggccccgacggacaagctgatccttcgactgtcactcaccctcgaccctttccagtctgagcgcctccccttcccaaaagtcccttcttgtgcaagaaactgggagcaggctttccttgctcttcagtgttctgggtgttggcgttgttctccatgaaggggttaggagccttactctccccttgttgagctatcagtagcaacgtcacatccgttagattcacgatcagtgacaccggctttccagctctagcttacgagcggcgttgttttggttggtctgcatgtttgctgatggtaattcctcgtgtcaggtcaagaaaggatagttcaggtctaggtctagttggcgagtggtcagactgtcgctcaatcggttaagctagcttttcgagggacgactagaggtatagtcggtatcggcttcttgctccgtcttggttgcggtcttggcgtggcggtaatgtcgttggctatcactatcaatcgagtgttctttggctggattgaacaagatgtcactcatcaagaagctgatcagatccaaagacgagcgagatgttcactcaacaaaacacaaacaacccaaatgattgaccgtggacccgtcgcgaaccatgcatcggggtcgtcatacccgactgattagcatagtctggcatctgggtttagatgcggtaacaacaatctttacaaagacgaaacagggcgagagaagaggaaaggaaatatctatccgatagtcagccggtcgagttggtataagaccagacagatatcgatgtttactgccagatgatgtttgaaggggtcgtcaatcgggctgcgaactaaggcggatgggagcaagcagcggctcaactcacgttgtagaacctcctgttggggttcttgccaaacagatcagtcctgatctctggtaacatctgcagtggggcgtagaaaagccaagatcagtccgagttcgttgtgcaggcaggtgatacggctgatgacgggactgaccttctcttcgagaatcttcaacctctcgtccaaggtgttatccaccttgatccgcctgttcatcacgctaccgataatccctcccgaggactcgtcagagacctcggtctggaaatcgagcttgcactcccggccggaaatctccttgtacctcttcagagcggcatctccggcggtgttgatgtattcctttgcagctttctggtggtcgatcgtaacttctgatgccatcaacatgagcagtacctggaaatgtaatgaacattagctgatgcgtctgacccaaagcggacttgacggatctcacctcgaggatcagatcttccaagaccttggtgtacttctccttgtcgttcttcaagtccttggtcttcttggtagcctcttcaaaaatgctctgcaggtgctcctcgcgagatcgcaacacttgcaaccgagactggttcaaagcggtcgatgacgcactgagcgggtcggcggatgacgaaaagatcagctactcgcgtacaacaagaggttgatcgggctcgacgcacatcttccatccgacctcggcctgctttcgtttcttttcgaattgagcatcgatagcagcggtctcttgtcgcacgatcttggcctgcaaatcgtcgatcgccgcacgaatcttgtcagcttgagaactagcgtcatcacacggtcatctccgtgactgctgaccttctcaatcgcaaactcttcgtcggccttgacctggatctctcgtgccttctccttggcttcttgagagatgaatgccacctgattgatggtcggccagattgttattcacggcgtccagccaggagagatgcgcgagtgtgttatcggggaacgagagatgaaagggagccaatcggtttgtatacgagtcgtgttgcggagatacgcagcgatatttgcaagagcaagcgatacggtggcagggaggtcagagacgaaaggatttgatcggtttcaggccgagattagctcgagcatccatatcaaccaccactccatcaaccgactgaccatcttgttcatttcggcagccatctccccgtcgtcaagagcaccggttcgcgaagacattgtgattgttcaatgaagtacgatcttatggagagcctatagcaagcttgtgcaggctatctcaatgcttgtgcagatgatggagcgcccaggtcgacctcgttcttcatcaatgatcactacctcaccctgaggtgaggtctcatccgggatgacgcgggatgcgcttggtctcacgatgccacgaatacgcgcttctagtggtgaggcggggagaggagaggggcaggggggaccgagtgcgtcttggactttacaacgcaactagacctcctggctcctcgccagtgcaacgactaccttctagtgatcatcacggttcgctttcaaaggccccatgatctcggctgtgtcttggataatgcccgcggaactgatctcggctagcaaatgatgagttgtgaaaggacagatagtatcgataatcatgtatccacaaatggtctctcaaccgtcatctggaggctttcctcgcagctggatttcgattggccctcctcttgcgaagcggtcagctatcggcgttgaaaatcgatgggattgcgaattggccgaaaggtcttgaccatgcaaaaaggcttcgggtatgctgatcttgggtctgtctttaaccgatgtgggcgaggtgggtacggattggttcgcttggccgtcattaacgtcgtcattgtggtcgtgctgagaagacttgggcgatgtcatggatgcgatcgagggagaggtgacgatgatattgttgatcggggtgtggctggcgtctccctcgcggaaaagcatactatgattctccgccaaatagcgaaggaagggaggcgaaagatttagggaagggcaaaacaccatgagcaagttttgcatggtcatcttgttcgttgaacgatgttggtccgtaagtgccaagagtcgggctgagacgacaagtgcaattagcgactcgtaccattcttgggcctcacgtatcggctcacccaagtcggctaacagccaccaattctcatcgggtagcttggcgagcgatagtgtcatttgaaccctcatctcgttcatcaatgactgtctccgttcggcctgcgttgcagctagctctctgtcccgcttgcccaggttcaaaagactggcctgcccagccatggcatcgctgacagccgccatatagccctgatcttgcgcggaacaaccgttgaaggtggtcatgatctcgtcaaactcgttaaaaaggcttgttaggataggagtgggtactgtcggaagtttggacatcagttcagcctgggctaagagcaactccgatcatcggaaagacgtacgctctcgaagatacgatttgtacagactcgcaactgcatgcggatcgatgtcaccgggatcacacggagtgagatccacgtccgcccctgcacagtcccccgatcagcctgattcccgaatcttgacgcttactgtgcttaccagcatcgaaatgcctcctcaagagggcaatatggctgctcctccctgacacacggaaaatgccctcctcttgcggggcccagatgcatactgatccgagacaagtaaggtcaccctacagtaatcgaagcttgggattcgaccccgcttaggcttacggtgatctacacaacgtaatgctaccgccggaagactgacttcccgtcttttcctccctgttgacgaagatccggcctgtagacttgaaccctcaactggccagaaagcgacggcaccgttcagatcgcggccgaagacttctcctttcacgcctgcaacaggagcgtgcctcttgaagagtgaaggctcaattttcggaccatccattccgttcatgtccagtgctgcggctccgctgttcgttgcgagagacatattggaggcgctccgtccgccaatcgaaccgatactggaggatatgttcgatggtggagcgctcgacttggagtttcggaatgcagaccagccagaggtcacggcagacccgattgctccccctccggcttgtaagtaactcctagtactgctagccgcactcgtttcttgcgaccaagcgccaatcctacgattgacgaccccaagtcctgttcttaggccagttgcaagtcctacaggactgacggttgtcaggccattcgagccgacctgcgacagagctcttggggcgtcgagcgagtgtccccgaagggtgtcgctcggaaggggaaggtgcacagaagcgcgactaggcggtggcaggaggctgtcttcgaagctcacggcagtcttcaaggtgttcttctcgccgttttttgagaggggatcactcagatctgagaccagagaggcacgatgatccaggtggattgccgggttaccagtcggtatcgatatagaagcagaaggggaataatgccgcttcggtaacgttggtgttgccgagatagatccaggggtttggctcttattcctggtctggtaagaaagtgatgtagctattttgcgaggcggtagggatggaggctgaactgcaaggggagaaccgactggggaactctccttcgagcttcccccggtgatcataatctttcccgctgaggccgtcctctttaaccatcccggtttgcttgccacaggtggaggttctagcttctcctttttccgggacttgccttcagaacggtctgtgtccctgacttgtatgatctcttcttttggaccagggctcttttctcgcgggatgagtgcccccgcgatcaaactgctgatggacgatttccgtcggtgttcaggtcgaggggaggctgacggggagcgagagccgggcccgttgggagaagccttgcctgacggcggccgcaacccaagggacgcatacgatgaattgcgtgaaccatatagagatggagactttcggcgaggcatcgagctgccagtgtcgtcctagattgtatcgcagccatcagcccgacatcgtttcccacaatcaaagaaactagccaacggtactcacctctagaccaagaccttttacttcagcaagttctgtatcgtccaatatctcaaagccgtcggcagattccgacttcttgtgatcacttccattactgccaactcggacctcttgtggttggtcttgtatactgacaccgattggtattgtctctgccggtttcgaggagcgttttgcgttcagggccatggcttgcgaagttgattcacgtggtgatgaccggaagttcgatacaggacctacggacggatgacaacgcttgatcttttagcaggtgaaaggctgtgctcataagaagaaagggcctactctgacaatactatattcccgttcaagaacaaaagcgccgcatcagggtcaagcagccttgccggtaggtgggatctacagggtcgccttctacgccgtgccagtagctgattcgcagtagatgggattgactacgcctcttcgtctgtgaggcctttcgtgcagcccggagttgtttcaaagactttggttggtctgtacctcgcgagtatcgctcgatcgtctgcggttccgctgccgactggcttggaacttgattagacgattgtctgtaaccccagcgcttgcgtgcccgatccggttcgactgatacgctagaattaatcttgaccacggctgacaacacgtcctgactatcatgtcctacattagtccggtgttcggatgacaagggcgtcatatcattgattccgtcgtgagcgatgatgctgagcgccgaccgcgaatttacttccgctgtcatgatcttcagttcaaaaccggaagcatatcattttcctaatctggtcacatgtgcctggatcaagttgagaaggcgacgacatgtatgactgaacatctcgtctcgtctcctagtgatacagcttagaaccgcttgttcctgaggcctagtacagattcgatacatgctaatcactatatgttcattcgctcgttcgtgtacgggggatcaaatgtgcagaaatctggttagtggcccgaggatgggacctaataaagccttcccgatcgtgaagggaagactggtgacgatagtgtaaacgaaagcgatggccaacacgggaagccagaataggaacaacatcttgtccactgaggaaatgcaatgcagttcgagaaggcgatcagtctcgattcgtgggcttacagatacgagaccacgccagtgcttaccttttgctggtgcgaccggttgctgcacttcatacgccaagttgctcctcctcacaggggtatgaacggtgacttgctcctgtcgaaccctgctagaaggctccttcggtctcctggaccgtagctcttttcgcttggacggcgtcgccactggggcggtcatattgactgaaccgacagcttgagcggtctgcactgcttgctgctttgctacctcttccttcttcgcttccgtaattgatggctgcgcagcctgtgcggcggtagcttgggtctgaggatgagctggagctgcgccttccgattgctccgccccggtccgggaaatggcggccataaacgcgctcatgggcatggccaaccaagtctgagctccccattgcatatccgcgcctggcatttggggcatttggggcatttgaggcatttgaggcacaaagacttgcgctgatggcagcttctcccacaaagcaggcgggatgaaatctttgatatgcggagcgggcggcataccacgagactgagggagatgcgaaagtgttctttgcagccagttggcactatcgaccgccatatagggtggcgggtgatcccctggcgactgcggtggcatagtgggcaaaggtgcgcgcgaagcgcgtggcgtgatactgcctccatcggtctcgccccggacgtcgtacttggacttgggcaacagctggggcatgttggggctggcagatcggcgcacagccataatgtcggccggagtcgtgagccggttcggcgagatggcccagatgtcttcctcgaccgagtcgttatccgtcgccgagctggggttatcaccatcgatcgaagactcgcttgtcatcgacgtcctgcgtggaccggcttggtgaggagaaaggctttgtattcgcctgttgcgggtgcagatgacatcgtattcggctccatgaccggctcgataggcgagagttgcagctgtctgattactgaaagtgcaggaagcttcgcgtgcaccggcagccaagagcaatcgagcgacattggtatggcccgccatggccgcgaatatgaaagcggtgtaaccgttacgatcatggatgtcgaccgtagcatctgctcgaagtaggagatgcacaaggtcgccaaatcccagcaaggaagccaggtgtaataatgtttgaccttccggcgagacgtggttgagagccgtctgacctgaagctttgcgcctcgaaaagcttcgagttctcgaatcggtcggcagaaatgccaccagaaacttgatgacagctgcctgcacatccttgctggtgttggaatagatcgcgctggccagctcatccgctaacagctgttcctccactgacatgtcgctctggccatgtgacatttgattacctgcagtaccgttgccgttattttgatagctttgaccctgctgttcgttgccttgcgggcctcccatgatacgccgtgcaatctcgactgccccgaccacttgaccggtaacacgtaagcccacagcggtaagcgccatttccatgctgtgaagtaaaagagtattgatgattgagctcctagcgactacgtctattatgctgagcacagtcgatacttacagttttctgtcggtcgtgtcgttgtaggtaaaaattgccggttgctggccctgcagcaattgtacaagctgaccgtcttcgccaacaacctgcacttgtaccggtcctgggttggggttgggcggtaatagacaaacaagcgtggttgggccataagactgcaccgtgacagccgggaatgccccaaacatgcaaaccatgccagggtggaagttctcccccagaatggtaacctcgacaccgccatgcgtcggaccttcggcgggtaccagccggttgatggctggtctcggctgattgggaatgacaggcagaggctgaggagcaaaatgagtcgagctgagctgatgaggcacgagcggcgaccacccagatgtagatgtgtcatgaagatctgaagtcgggcttgcaaactcctgaggcagcgtcgaaggtgaactttgtggggagaagttcagcatagactcgaagtcaggctcgggctcgagcaaacgatgtgaaggctggaagtagcgggtagcggacgattagagacgctgtatatcaagtttactcatcggtccgatctgaactaaccgaatgttgcagcatggcggaatggtccgctcggccgaatgaatggagaccgaggttcgactgcgactggttcaattcgtggcccatcccgttgccaaagtcgggctgttgcaaatggaattgtccagcattggcactgatcatctgtgcaaactctccactggccatcgggttcatattggggtcttgcagactgaactgccaagattgatcgtccaactgcatcccgttgacattattggcaatgtcattttcctggctggacaactgctcttgcccgttgttggccgcccattgcgaaagctgttgcgagatagctggcaaagcggccgaaagaccgttcgggcttccctgtttggaccactgcgcctgcccttcgtacggtccactgctcattaccaggctaggagagatagctcctgagcccggctctgccataccgttggacacgaagtaggagtttctgtttccggtcatgggaagtggtgaacctggcacagagcgaccgttcaacggtgtcatcgacaaaccaagaggtgtaaaagaacctcgcggagatatgggacccgcattcgagatgttcgatttggcgtctgactgcgccttgcgatcgtacggctttgcttgccgaggccgtttcgaagcagtcgacttcttgtcctcctccgtcgaggcggagctctctctgatctttttcgtccttggcttggaccgcattgatgtgacacccttggaggaagcactgacgcctccatctgtcagagcgctcgtgactgacgtccccttgttcgtgggagtcttgtgatcatccgtaatcatgactggtggagtggtcccgcttgcgacaaggcggccaatgtgatcgcgtagctgaaaaaccactctgggattgcgtaatccagccaatcagtccgagctctcgaatgcttgctaacagacggaacagtgtttgaaactcacctgaaaccggtcttctcttggtgatgcttgcagtagcacgtcaatcgagctggcaaatcgcactcgccatccaccagctcgactaaaggtccgcaattgaagagcaatatccgttccttgtcctcctgtgtgagtccctcctcgtctacgggctcattggcaggttccaggcctccgtgaaatgaatttgggtgtgcaacgccgttaacgggctcatcagattctgacggtgcgatgcccttcttcgcggtcggagcccgagcttgagctcgacgacgctcccgattgacgcatttcacgcaagcaaatgctctgaccggatggtctgtacaccatacctcggtataaaggaacaaaacgtcttccggccggtaaggtcccagtgaattcgggtcgccgcctttgtctgcgttctttcgcactctacgccgagctcccatacctgcccgtatcttgacagccttatacgtcccaatcttttcgaaagggttgttccagggactttgcgagtctgcggtattcattccgtcggtcccgttggcctgatggctatatggcggattgaagccgtctccgacgtggcccgagtctggcattgatgtgctcctcgccacagtcaccttcatcttgatctgtgtttccaccctggatttggccccacggcgtttgattccatgtatcaacaggggtaagctgttgtcggagggtaaagcgttaatacatcgtcaaagatattgtcacgaatcgattgagactcacttgttcaaggtgttgtgaggcgggtaagacactttccaatgtttggtactgctatcctcttcctcgttcgaaccagtcggggtcggcatagtgctcgtttgggtactataaggcatcccatacccgaacggcatgccgtgtcccattccagccgtgccccctagtcccgaagccatgttctgctgttgcggctgctgatgctgattttgatgatgcggttggtagttgtgattattaccgttatcgttcatcaaacccatcccagcgaagttggcccctatatctccgacgcttgatgtcgaagcgattgaagctcgaggtttggctgatcgtcggggtttcttgttggacccagggactgatttagcctgatcagattcggcatcggtcaagccgactcggagccctatgggggacggcggaggcatgctggcagggacagggaccgcttgactcatgggagccggtcgaaatgtgccatgacgggtcatgaccggtgacacggatgacgacgcagcagtgccgcgagatcctggacgatgttgagcaaaggtcgagggaccgggctcgccgatgccaattccatagtgagacggatccatgttgggcttgacgtctagccgatgaggagagcggcggacctggtcgtgattgttgatgacgttgccgccactaccattcgaaaaaagatttcgtggctggacttgagtttgagcgtacaagaacgaagggttgttttgcacgtaattgttgccgtcgaggttgaagaaagaggtaccgtttccgttcgggttggatgccatgggcgtgtcgtcggtgtatcccgtctccatactattgtcgcctagaccgctgtcgtacatttgttgctgactagtattcgcctgagcaccttgtgctcgacccgctcctccagcatgaccgagcccgctttccatctttattggcccgtccatagcctttctttgttccacgtcgtcgaacgattggcgtgcgctgtcgagaacgccttgacgctcaggtgtgtcccccggcaagcgtatcacggggtacaagctttgtccgtcgtctatcgaattacgactcgagatggttggtaaggaggccgaatccgtcgaagatgtcgtggtgtaatgtgtaggggtaggagaaggggatgcttcaaacatgcttcatagtagcgaagccgggagcgtgtgaggcgtatgagattatagagggtagactatctcttagagatatcgaggtgatgacgtccgagtataggaagtcggacctcctttttcccgtcgggttggcttttgtgcctctagccgggcgaggaaagtctttgattgcctcctcgtctgatctccggatccgagtgatcgaccagttctttcgttttcggccagccggtgaactctgaagaggtatgtatgtacacgatctcgattataagctcgtcagggatagcatgtgcggatgatatcgacctcaatgcaacattacggacgtcgtgtattcctggttgttacacctttaatcagtaccggcggtcgtcctcgcgatcaaagcaagcagcagagtccttgagaaagaggacgcggaagcagaaaactcgtgtgaagcaccacgaccacactgccctgccagtgagatcgcaccttttgccaatcgagttggacatgggtttaatcatcagtcggtcatggaatcctcaataggactacatgaaaacagacaagtgaactgctgatctgcatgttccttacctcgtgcaggtcgacgtgagccgctcaaggaaccataaaattccacgtcccggtctagtcgactagtgtctcacgcgaccttccgtttcatgtcagccattacgatctggcctgtcacagttcactgtataaatggttgaatgactcgtttccttgtgtccctgaatggaaccaaaatgaaagtaatcatgtatatcttatgatgtaacgtcgagccggaagagctcgtagtgagaccgacgatacatagcccgtagtccatcttcgtctttgaatttctccctcgaaagcaaatgaaatctccaagcgaccgcgcaagcactcactgcaagaacttcgtcccgcagtcatagagtatcgtatataaatggggattgtccatttggcaaatctccacgaacgagagatactcgaatgaggtcgaggtcgaggatgaagcggcgtgatcggcttggaaggaattgatagcgttcgaagatggctgacattcagtaatttgcagccaggcaggggcatgtcagtggctgcgataaataggtcagaacgtcgttgccacctttccagcacacgaaccgaacgggataagctgtttcgggctgatgagcaggtcggagggagcaccgagctgtcatcaagaaaatcgcgaaaacgggttgtcagccgaacatgaacttgcagaatcgagaagtcgagaagcgagccttgcacgagtatctgaaatataaacattgactcgaaattcagtcaatacatgcttgcgttcggtgcaactcgtgaactgtatccggcggaaacagcgatcttgacaagatcgtccagggtcttgctcaaccttgtcactcgtcttccgcctggaacaaggcatgacgaacttgcgccaaaatccagtagaatatgcgatctaatcatgcgagagtggcgtccgaccaaccatggttgataatctcaaatgccagtatcatgggaagtacatgacttactatgcaaagaaagtcgctagattcgtaccggggacggctgtccgtcagtcgagaccgttgtcgctcaccctgaggttcgcgtgcgagcagcgccctgaacctaacgccaagcatgcgtcggtcggcaaaagcattaagcgtatcataagagggtttgtctatcggactcatttcatgaactattgggagacgggcaatctaaaaaagcaagataaaatcattcttgctgaatggtgccgaagggcacagttgaaggtctgtatacttctcccagatgacttcatccgtgatcacctgaaggagagcccagagctcttgaccctcatggtatcagctattcggagtacatttggagtagaagcaatgccgaaggcgattgggaaacctagagcagatgaaacgctccatcgaccacagatccaactccttgcagcgttgagtagttatttggctgtgcaaggctaggcgggagcggaaaatggcgggttacttccctcctcctcggcagcgcgcggggctccctcgccctctttcctctcctgctctgaccggattgggagccaagacaactgctgctgaagtacatgttttgcttgcggacgacgacgtcaacgatcctttgcagggggatcgaagaggatcgtctaaaggaggtcgagcttgtctccaggtgaagttggagggcagtatccaaaagggacgtagattacgatgatatcggtgtggtccggtcaggggggggagcgtgcagagaggataggggggggatcgtgctgcgcgtgtttcgcagttcaggccggcatgcatggacaagaggcatttaggctgggatagagggtcaatggataggagtggctgcgatctcgtccaagtatcattcagagcatcatcaataattttccattgtggcatctttgctgctatcaagccttccttttagtagaagagggcgatataaacacagtcggctactgtcagatcagtatagattcgacgacttttggctgtcaatcgtcgtcatcacgacatccacaacaagcaatcggtcaaccgacctccgacaaggaccgagcgcagcgcatcgtgtcgaaccacatcaacacgtatcgtccatactgagagcgagggtgacgtagagacactgtgtacggtttgacctagatcacctgaacgaccgagtcgaaaataagtcgaaatcacaaggcgaatctatcagcggcatcacgagtagaccggaactatccaagaccgtgattcaacgaccctcaggcttgaatcatcagatcattctcggatcagcctctttgacagaaaaaagggcgtgcaaccaagatgacggtcgctctagctccagcgttgcctatcgacctggatcatcacaagctcgactttccctcatcctctccatcttcccctcggacccaacccgatatccaggcgaccaacttgccagatcctaagctgaacgggttcgtcaataccggcagccctagtcctggtcctgatgccggtccggcttcaaatcgagcagagagggctagctggatgagagcgtccttatcggactcgttgctcgagacagggaccgccgtctttagcccgggctctcagagcaacgggaatggaatgatggacggggatgatgggtcgcgaggagggatgtcgacacaaaaagaccgcatggaggtggacgacccgttcaagggatctccgatcaggtcttcagggaaccgcacgagtgggagcggatacacgtcggatacgtttggtgggcatggggctgggttcgtctacccaggtaaattgaacatggacctcgatccatcagcaggtcatgagggtggattcgttaattcaagtcctgtcgagattatggatcgtaaacgcgaagcagagtcgagacaaggaggaatgtcgttcaacgctggacctcctgcgtcgcacgagtaccctcctctctttggcgtaaacggcgacagcaacggtacggcaaacgaactcaaagcccgcagtgccgcatcttcctcctcttcgacacctcaaccggcaacggcgactaccatgatcggacgggaagagcccatcagaatcccagcatcattgtccccgccctcacctccccatccgctctcgctttcggcctacctcgccgctcaccccgaagcgacagtgaagaaggccttgcgcaagacatatcccaaacccaaccccctcgttagattagctaggcgtttcaaggtccggcacagcgtcatccacgggttgactgataaggagatgagaaagctcgaagacaaggagggtaaactcaaacgagatcaggcgggatggagactagaaggcgaacccgaagtcggagcggacggtcgaccgagagtgatcatctcgccgttgttctggaaagtatatctgagcatccttcctacgctcgagagggatccgctgagcgggttggtccctccgcccttgctcggctcgacgaccacgatgccgctgagcgtcatctcgttgatcccggacatcatgaggcattatcgagacgtcattgtcagagcggaaaaggaggtcttcttggtcaccaactattggcagtgagtcccaaaaggcaccaaatggtgtgtgtcagaccagcagggattgagcgtgttacgttgttaccggcggttctagaccatccaactcggtgcaaactatcaccgatgccttcagagagctgtccgcaagcaccatcgccaggacaccacctggacagccggtcaaaaaagtcgtggtcaagctagtttacgatcgagggacattggagcaggtgagctgatcaaacccggaagcaccgccagcgtgcaactcgagaattgaccaatgcgcggcgcctgtcagatatggaacgcacatgccccggtacccacaacaggttgggaagcaatgaaaatccctctacctgaagaggttccggggatcgatatcgaggtggtggtacgttccttgcgattatgcgagatcgagagcgccgcggtagccgatcatgcgctttgttctcataatctcagaatttccatagattgctgctaggaacgttccatgccaaattccttatcgtcgatcgaaaagtggcgttaatcaacagcaacaatattcaagatcgtcccaatctggaaatgatgcaacatttcgaagggcccatcgtcgactcgttttacgagacgggactgcattcttggtttaacaagctttcacccatgttgccttgtgtcggagacacgtatcaggctcccacggacggatacaagtttggccacgacaacccttattttgccgacattgagatcgtcaaggctgcccaggaggcgaggatacgtttgcgacaagaggcggctcaagttcatgacatggacgaaggcgctctggatagatttagaggaatggtgcgcaaggcaatggagcaagccacaaacacggccaatgaaaggtgggacgggatcatggcggggaacggtgagggtgaggggatcggtgcttgggctggacggatgagggcgggcttcaacacgagacccaacagtcgtcggccgtcgttcgacggaaatacgcgacggaactcggctccggtcgtgcagcgtcacttcgaccgtctcgatatggtcacaatcgattccgagatgagcggaaactcacccaccctggtcaacgagtacatcaacggagacgtgccgtcggccaccagatcggcaaacaaggagtcctttgatcacgctcaaatttcgcgcaagatcaaaattgccgaaccggacggtgtgacgccaggatcgcatgacgcagaagcacgacgtatgcatctacaagatggatctgaagccagcaccttgccaccatcagcgacgtcgacgctcaaggtcgattcggccggtcggccaagatccggttctggccgtctacagcagttgacggaaaagttcagtaagtccggctcagctgggctcgccccctgtagcctttgctgacctatttgtcttaatgtgaaagacgcgaccggagttctctcagaggctttggccacggtcgaggacaatgacgagctggacgacttttcgccgcacgtcttgcataaacctcatgctcccttcccgatcgcaatggtgaaccggaagccgcacgggagtgagtcgagagtcgcgtgatatgatgatctcctcgatctattggactgattcgagctggccctagtgcctggacaccacgacatccgaaacccgcaaaacgccgcttggctagctgggtgtcgttatgctcagcacaagatcttcatgtaagtctcgagggctaatacgatgctgtaacctcgcggctcaatgggatcctgccctcgcacgataaagtcaaactccgacactcaacgctagaccgatcaagcgtgccatcaaacaggcttgtcgtcgaggcgtagaggtcgtcctctacctcgatcttggtaagctctccctcaaaaactccgatcagacacagaatgttctcttacatacatatgaggactaaattccagggttcaacgacaagggcgagtctatcccgttccaaggagggaccaacgaggaagtagtggtcgagttgtatgacaaattgcgtccagaaaagaaggaccagtacctcaaggtttactggtgattttgatctgaacgcgacttacttgagctcttcagcttacctcgccttctatcgtgcaacacaggtatactggtaaggaccagatccgacccctgaacgctgtcaagaagcaacggaactgtcacatcaaattcgccatgtttgatgacgaggttgcgatcttcggaaacggaaaccaagacacccagagctggatgcacagtcaagaaacgaacgtcatgatatacaaccgagagattgtgaaggaaatgatgcacagtgagtcttgtttgcgtgattgcgcgtgcaagtcaatagcaactgacaatctatcgcatcgttacagctctacacaccaatcaaaacactcacctttatggtcttgtggatcccgccgacggtatctggcgggataaagacggcaaagacttcaagacttgggatccgaatcacaagaaggcttcgggctcgatgggtctcgccggtatcatcgagaccatcaagaagatgtgatcaggacctttgccgcctgttcaaaattgacttgagaccccgtgcatataatatagctgcgataataatttgtatacatcgtcaacatagacctacatgagaagcaggagggtacaccattcttgacgacgtgttgactagggaaaagtcctgatcatcaggcgcaggctcgcttaacgtttcttgcccggaggagggggcagaaaggggatgccaccactcgtggcgcctccagcacccagtcccattaagccgctcgagctttcgtcggatttcttcctgccttctcgccccggtatcttgatactgaaagtctgaccctccttgagcgaaaagtcctttgatggcggaggaggcttgttgggctcgttcgagctgtttggattggacaggtgcttggcatgagattgcagggcgacgttgaaatcgaacctgtgcgacatcatatctcgtctgtcagccacatgatcgatccaagatatgtaacggatttcaacgtacgcatctcctctctcctcgaacccgacaccgatgtaggccttcttgcctccatcgccctcaacacggagcacgaagtatctcgaagaatcgaggaccgactcgacagagttgttagatggagaatatgctgtcgaggcgaagagctctcctgtcgtcttgtccctggagtcagctttctcgggtgttcaaacgcgacagcgacccgagcacataccggtgttaccgtcttctaggcggatttcgcaggtcctgcccttttccaaaactctcattcgaccttgccacaacaacccttgatccgagttccattcagctgccttgtatccttcattggaacttcttggcgggacccgatagactttgcgcaagaacacaaaatgagcacatcaaataccacctagcacatcactcatatcgctcacctaggacacgctttccaatgaacaagatcgactcgatttcgtcagataagatgtccatgttgaagaatcggtatgagacagtgtcgtatagtcttggacaaagaaagcagccatgatagtcaacgattctacatatcggcctttgcgctcctgcatggcctcgacctttgtacgcgtcatcatgaattgattgctgggatagtcatgagcagcaccacatacattctatcatttgatttgcaacctgtcatcaggatagattcacatatcatctcgaccggaaatgtacaacggttgtagatttacatattatgggcagaagccatctcacgacaagaagtcctttctcactttcgcccttttgtaggtcgctccctcgctttggcatctctgtcatgcggcgaacgatcagcctcgagtgcgaggaaacatctacataggcaccgtgaacttacgcaaacgccctggtctttctctttttatgatcgaccttcatgccggcgcgcttcagccgccttgtagcttcgagttggggttcccggaccatcctctcgtttgcgtccattcttcgcttggctcgcttttcgactgtgcgcgatcgaatggtttcccaagtgcgcgagaaggccgtgactccgaccttctgggacacgagatcccttacttctgtgacgagcatgttgagattgtctgaagcggcagcatagatgatcagtgaccggcgcgtgtacctgttgtagcaatttgtgacataccgagttcaacgtcaccaggccgggtgaccaatccgccgctttcgtccagcacccggtacatcggctcgcaaacgtgcttgaggtatagtttgactgtgtccttcgacatgtggtcgaccagtgcagcaaatgtctggaagacggccgtgagaggcggggtccacttgacctggaagaaacagcagcaagagaccttaacaacaagacctttagacacgaaacttgtgaccactcacgggctgagcgatcagttccgcggccgatggcttcttgatgatcaggcgccgggcgacaaaggatagcctagacatcagccaagacagtccgttgggacgggcagaggcatcggtgatcgcgttcgcatcgacatcgtcatcatcttcatcggacaattggtcgtcttgatcatcttgctgatcaaccgggtcagacgcaaagttgtcctgcatgaagtcaagacgggtcattagtattcaccttgagtagaaagcaacggcttcgacttctgctactcacgacccaagtcttgccgatggtgaataataacctgactatctggccgcagagcttttcgttgggaatccttctggccgcgccctggtcagcgccacttgcaagaatcaagcagcattttctggcaacttcgtggtcctgccccgggtcgcgagtaattgcctggttgaaacggtagacaagcagtttggcggaagccagacgaacccaatcgtgagggaaaattagcagagggacgaccgcatcccatgcgataagcttgctagaatcagcatgtcgttcggccaaaatggagagggtgttcaacgtttgatacggaagagcgtagtcgagatcaacagcgtcgaatgccgagatttgttcctgcatctcagcttcttgcagggagtctgccgaggcgatcaacatcttgttgaggtcactgacaatcgagtcgagatggggcagcagctcgtcattaccgctctgcatggccaatgcggcgatgacagcgctcgacctagccagcgcgacatcttcgtgccgctgagctgcccatttgctgattgtctcgacgaacttttgcatctgttccgcatcataccgttcgatgagcttcttcaacagttctcccgccatcattcgacacttttcagagtcatcgttggctatgacgataaccaaagcgaggaagaaaaggctcgaataggcagtcaccaattcgtccgagaacttggcgaagcagtgcgacagaagttccatgaccgatacccgcccactttcgtagacgtagctcaggttggatgccaagaattgcatcgtgctcttcagtctgcctttgccttgaggatagtccagtaggaattgcaacatggcggatcgacacaattcctgcacggtgatagattggcttgtaaccatcaccgaagcgaccttctccatcagatcgtagatctcagggacgacaaaacgcttggagagaatggcccgcagcaatgcgaaggctggagcttgagtgtcgtgttcatccaggtcgggtccgataatttcgacaaggtaggccagctgcttctctttgatcactgccgccttacagtctcgaatgatgacggccaaacttcggatagcggtctgcgcgacctcagaagaggccgatcctccgtaacggcgaatgacggcgatgatttgcacgatcatggcaggcacagcatcgtcaactgctttgataggagtcttggtgactgctgcggaagccttgagcgccagcccgagcacaaagtctgacttcgagtagagggcgttgccgatggcattcaccaagggggataatcgagcgaggatctcagcgtcggcaaaatcgaactttccgcgacggaacgccgtcacgaagagatctagaccgaaaccgacgaacttttgcgagttcgccgtatagtgatcctcgtcggtgaccagtttccgcttcatgtgaactttgtaatcttccttggcagcgacctcctgatcctttccagctttggcgggtcgcaaaaactctgcgctagagcttatgagcgtgtagcacagacgaagcatttcgacaggtcccaaaagaggattactgttcaggccactagcgatcctgtgaagggcttcgtccagctgttgcatcggtttgacagccgatgtttctcgcatgatattcttgagaggtacgagaatctggttcacgcgagtcggggaaaccaaccgcgaaacgagctggaaactgtcgtagccacgggaactagcgcctctaacctcacgcattttggtcttgaaaccatcggccaccacatcctgtcctgattgtccccagatcacctcagccgagatggcgactacgtcaggtatcgaatcgtcgagactactgaacagttcagcagcttcggtagtgacgaaagccaagatggcatgagtgacgaccgccaagacgtgcagctgtggcccccgctgtaagctactgcgcagctctttgactatgcgcgagagccaatcaggacccaatgtgagagcaattttgcagacagtgtccttgaccaggtctctcgtatcctgatctttgcttctgaggatttggctcaggactgtgatgacgcggccaatctcttgatcccggatgtcttctggtagtgccattgcaaccttgaccacgccgagcgccacgggaattcgtaccgaatcctctgtctcatctttctgctcgacgaaccggatgagtgttggaagcagcttgcccgtaacgtaatccgcaatctttgcagactcgcgtgccgccaggtcgatctgaggttgatcgtcgtcgtcctgttcggcatcctgatcgattgctgcagtatctatcgtgcgctgctgcatgtcaaagtggaagttgtccaacagagccgtgatagctcggacatagtacctttgcaaaggagtcttcacggttccaagcctcaagtaattgaggacgcaggcatgatacttggaccatcctaaattgcgagcgagttttccgatcgtggtgatggcttcattgatcagagtgtgatctgtcttgtccgaggcaccgctcaggacatgaccaagaatgggcataaaaataccatagaccgtcgcatccctgatggtgccggtagcaacgtgatcaatcaatctcctgaacgctcgagtccgtcgatgagtttgcagatgatacacgttggtgaagaagcttgcctccacgtctccgtcagctagcaagggccgcatctcgtcgaagacctctagtccttggcagtgttcgaccatatgggcgatgaccaagacggcttcagctcggaccaattcgtgccgagaccggagaacgtctttaagtcccggaaggaccaggttcatgatggtgccttcggtatcctgatgtaaatctttctgagtaaaagtgctcacgaaatgtttgatcgcttcgccagcgttagatctgatggtcaattcttccggatcttgcaggtagaaaagcgagttgtgcaatagcggttgccagtacctgatgccgaggctagcgtggtctagctcgtgtagagtttggtatgattgaagtcgcttgtcaaaatcaggttcttccactctcttaaccgagaaagcgttcaagcccgcaatgacatcggtaaccacgctcaggccagggtctgcttctgtgaagctttgcagtaccaagacaagattctgcctggctgctcgcgaatggagcgatctgaacaaggtcgagacgatgttgaaattcgttcgatagaattcggattgagcgtctttaaagtcgggcaccttgcgcaatactgtaccaagggtagaaagaatgtccgctttaaccctttccgagacctgtttggcaggcttccgcaagatcggaactagcaacgtgaccaacttgcgtgcttgttcgcctggctgtgcaaatgcactaatgcgcggtagcactccgatttgtcgcctggtcacatcgtcgcgactgaggttgactttgctgatgttggccatgcaagccagtagattgtccaacaagccagacatgtaaggcttgaggaaagtgtttgccattgtgccttccgctacgtcttcttcggctgcagccagcaatctgtcgactacgtccaggacgtgtcctataacgactggcttgaccttgggctgtccaatgcaggcgaatagttgcgacaagaccctgtcgtcatacgcgacgaggaaattgtacatctccggtctttgcgaccaggacgagaaaatttccatgattgcagaaggcgcttgtgtattttcttgcggcagcagcgcaagacgcggcgaaataacatgttggaagaggtatggcatgtagggagcgaagttgaagtcggacggcgccttgaaaaagccagccagtcttcgcaggccagcattccggatggtccgaacaggtagaccgccggagcctttctcctcgcggtcatcgtcttctgcttcgagatcgtccgcttcgatctcgacgacttcagaagagatgcggctttgagcatgagaggttagcgcaagtgctgacgacaagagcgtaggccagaaagtaaggatctgtgttgacaagtgcttgaggacgtcgcctagcaggctcaagaacccgatctgagtacgacctcggatgttatccaagtcgccagaacgtgatccggctgcgacgggttcgagagcaacgtcacgtatccacgaagggaaagatctcagcatgagctcgacgagggtagcaaaatcgtgaccagcgcagttgcctagagcggctaggatcgcgttcttccgagcggcagggccttgattggagctgtgacgtccttttttcgagatcataattccgaacagtatccgtgtcacgattggcagcagattcgcccgatgatccggattgattacttcgctgttctcccccaacgggaatttggtcaactcgtcccggaattttgactccgtgagaagaccgcgaaggttgtcttcatagggcacgatataagagtgcttgtaagtcaaaagacacgtcaaggccaaattctgtaggggattctcgcccttgctgagaatgtcgagatatgcttccaggatatcgtcggttcgatacagcgctttcgggttgccgaaatgcgagaacagggagagatagttggacaatctctgctggcgagcacggcgtcccaaaaccaatccaccggcgttctttgattgcttgaccgcaatggcatcttcgccgtcatcctcttcttcctcgaaactggcaacgttcaagaagacaggaataatctccctgccgtgcttttccgtcagggaggcaagtttgcctaaaaggtccaacacctgagcttcgtaattgacaatgtctagacgagcgtcattgacctggtcctacgataatacgtacaggtagatgagcggtgatcatcgcaagtggagtcatggacacatacctctatcgcttcgtcatcggtcgtggatgatgactgaaggttcaactccctctcagttgctcggtatagtttgttggcattgggacagaggaaagacttgtccaagtgctcatctttatccgccatggaatcgctaccagcgttttcattagcccattcgggtttggaaaccgagatcagattggcaaggtcaccgccgtggcacttgtcaatctctgccatggcaattgtccagaggatctctgggtgtcgcttgccaatttcgctgagaacctcgagcgtatcgctatacagcggtcggaagttgaccttcaattgacctagatgtcaaaagattcagtctatgacccgctttgtggtacagatatttcgcttactgaataaatagcggatgatggcttcgatcagccatgcatattcctcatcatggatctctagaccacggagaacgaggccgatctttctgatcttggtggtcctctccctcacgttctgcagtgacatccctgcgtcttcgacctggagcccatagttgaacacgttgatctcgtccgaatccgcgacctccccgccgaccgttcgcaatgctgggaacttcccggtgacgaggattctgagggcccctgtacggatctcaggatcgtccgattgaagtcttccggaaatagacgagacgatggactcgagaggagatcttgaagaatgaaaaagttcattcagcaagagcatcaagggctatttacacaacacgtaacctacttttttggtagcgctgcctcggccaaacgccccacccctgagacaactccacgtgaccagctccatgcttccatcagatcgttcacgttggcgataacctccttggcagccaagtctcctccttgcactcccgaattaacgagctcgctcagcgtcttgagaccgcagctgaagaggtaaccgcggctgtaagcagcagcagcatactctgctttggcttctgcttctgatagtgagcagagttggcttcgaatggtgctcaagaaacgggtcagggcaggcaggaaatcgcctgcgcttctatcaagcttggtacacagcttgagtagcttgcaggcagcccggatatcacttgtgctcaggtcagatgcccgggcgtcccactctctgaaaaggtttccgctgagtctacccaagcgattcttccattggcctccttcgacgttgacgagtcctccatccagatatccctggtcggcaagtaaggcgagaacaccaagagcgtctgctcggtgcgtatcaagagcctccgtgcacgttctgtaacagcaagtttcatatgtatcagtatgacatgaataaaagagtggaattagagaaatgtaccaaccttgctatatcagcgagaataaactgctcgatacctttccagccaactctgacgaggatccgtacccaagccagtcgatcacgaacgtctagcaattgccaagtcgctttgatgaggctgattccgggcgacagccagtccttgactttgcccgccacgagagcgcccgtcagggccttgagatactctctcttgaacccagagtcggaggtgatggaactggtcaggccttgcaaagccagcatatagatctgaagggtggttgtcttctcgttggctgccgtcggcaatctctgtccctttcgtacaccgagaagggtcgcggtaagacgaaggaccagctccatctgagctacagtgagcgaggtaggcagagctgtctcatcagcggagacgtcctccataggggagtcggatattggtgtctttagcaacttgagaataagatcgtgaaggggttgcaaggcggtgggcgatccgtgatggatgagagaggtggtgagaaggacgaggacgcgcagaaggggagctgaatgttcgatctgcaacaaatgcaacacgagatgcgtgtaaatctgaggggctctagaatgaagcaagtgaggagctccctgcaggcaacaaaggttagcgcttcatgtgagacgatctttaacctcttcagctcaccttcagactctcgctcaatgccgctgctaggccctcgaccgcgtcctcgtcgtctaggttcttgaccataacgacaaccatgtcccgcatgggttgacccctagctcgtctcaagaggacggcccatacttttgccgcgcagctgcgaacgtgcggcttcatctgtttgctcaggtacgccttgcatgtcttccagatcccttccaaccgggcttcttgcgagacaacttcgacggcaaccaccgactttttcttgcgcttgagtgttttcgaacctgttgcctttgatcctttgacgtcggtcgtcaaaagcgccgaggagaggagcttgaagacctgtgatgccgttgaataggtcttttcgattaagaccgcctcgagcccattgatggctccaatcttgaacaaatccttcactgcctgttcggcacaaacgacaccttcatctaggaccgtctcgaagaatttctcgtagagcaagaggactccatctagaccagagttctgtgtcgttgattgattcgtgatcccggtgaagaactcatggaaatgttgctgcagttgggggatatagtggagaatgagaggaagagaccgggtaaggggcaggatcttcttggtgaatgcttgatatggtagtgtcaggtagagtagggcaagatcttccagcgccgtgccgagtggcgtaacctattcaggacaaatggctaagcatctgggctactgttcgccaaggtcaacctcagcatcactctgaacttactgtgtgtgccaaatcatcctccttagctgcttcctggacatcatcccagtccaagcctttgctcttgcccgtgtcgattttcaagtgaccgagctgtttattgtaggtctcgtactgatagcgatttcgatcaaaggcgatcagttctcggcttcgagcggatggcggaactctgcacgccactcaccctaaacctctttgctggccgctcttcggccatcttgcgagactaacaatgactcgtatagtctcttgttttgtacacggggtcctagctttgaaaattgcagagatgaagcgagaggccgggaggatggaaaaatcgaagacctcatgcttgaaccaaccttgacatttcacttggtgagcgctgaaatcgagaaatcggtcggacaaggcctagatcacgtgatcgcgaatcatcttccggaaattacccccgaactttacttatggtctccgtctcatctttgatcttctgcgattcaaacagcaggaaaacgggttgtatccaacgcttcgaatcgatggaacgatgtgggcaagatgtaagatggacttgttggtttacgtgtaaaggctgcaatactagtcgcgatggatgcacacagcctagccttgcgcatgagacagagaggatagttgaaacagagcgacacatctggctaactcgtgcttccacatgtcgatatctgatgatacctagcagactgccgcgaaacaaacaggcggtatccgagcgatcgcgcccgtttcaagcttataaatataatctgaaggaagaaccagaaacacaaagattacccaaggcttgtgatacattcagccggatgattgcgacttccgtcttgagcagggttcactcttatttctcttctttagatagacagataactcagagaagactatgaatggcagacaagcgctagcgaactgacaggttggacttcacgatgaaagctgtccatgttagagattcatcctcatcagatcgttcaacgtaccgttgatcctgcagatggctagacgtgaacgattcttgctcacgccatgggctgatgaacacgtcagacgagattagtctcgcctcatcttatcaaagaaacgcttgaggcagctcgagcgcgtcccaccagatcaaaacgcatatttccgtaaaaccccgtctgcggaatgaggttatgcgatatcatctgcatcaagctgacgcgactcgcgagataacgcgtcagctggcctcgcgagcccttcatcctcgattcaaccttgccagcttgcgagtatatagtcatacacatcttgacgactatgctcttcccctcaatcgtctctcccttttcccaatcccaagcaacaaggcaaagcctctccactactctccccactttcaccaccactctcaacaacttctcaacaacatgtccggtcgaggcaaaggtggaaagggtgagtcttcacgacgactgatcttgacaaccctttcggatggtcagtaactgatctcccgcaatactataggtcttggaaagggaggtgctaagcgacacaggaaggtcctgcgagacaacatccagggaatcaccaagcccgctatcaggcgtctcgctcgtcgaggtggtgtcaagcgaatctccggtctcatttacgagggtgagtcttcattccacttctacatcccgatccccgtctgattcgacttgatctttccgtattcacagagacccgaggagtattgaagaccttcctcgagggaaccatccgtgacgctgtcacctacactgagcacgccaagaggaagaccgtcacctctttggacgtcgtctacgctttgaagaggcagggaaggaccctctacgtaagcatgcttgacttggctcttgccacgcacttcaccaagctgatcgcgcttgaatcttacgccatctcaacagggtttcggaaactaagcctaatcgcccgatcaacccagagttcgcctgactaccaccaacacgcttcgacattcgcttttcgctcccacccacccgcatgcgcgatgatctcactatcgtttcgggcggctcccatctcatcgctcggcgtgagttcttgtgttcggatttggccaatctggacgtcgcaagaatcaaccgctcgcgctggacgaacagtacggctgtcatctgactgtagagagaacgaatcatcacgctcgcctggagtttctacttgtcttgacttcaatatggattgcagtaattacacatttacttgatggatgattttgatttgagaaattgagccttccaacccctgaatttgagttggctgcttcgaccgctgtttgagctctgttccaggaagaccgggcgacctgatggatgaggccagtcaacccaagcgctgatagtccttgttggtattgcttcccatggatcgcatcacgaatgtataattgctttgcagccgtcaaccagaatgtcaatcagtagcaggctgtttctatgagtaacaacagggtataatgtaacgcagactacacgtaacgaagttcgtcaacagatgactacaaagccgaggcgtgcagaggatatatcgcatggcaaatcgctgcatcgtccgtatagccgtcacatccgtccgcatggccggcatgagcactaccgaggcgccagcatcgttactgtcggattcgatattgtacgtatcgatcgcgccgttggggcattgcggtctatgagacgtttgcgtcttcggtcctggcctgctctattctggctacatgccgacggccagacggggtttagagttgatgagtgggcccttccttcacggcagggtgccactgcgtcagatgctcggcagcctcggatgacgaaggcttagatggcaggggtgcagtgactgcaggtcgtttccgcctcacaccgactcttcccagatcatagtcgaaggcacccaaatctccatcccgccttcggcttgctcatctacccatgccagaccgtcccgcttgaccatagcatcgaaggcgctcctcgtcctgatatcgttccatccgagaagtgccatgatgtctcgctcggagagacgtccagcttgttctcctgcgcaaccgagcaagctcgcctggtcggagtctagctcagaggcgacagagcggacgtaggactggtgattgacctggacaatctcataacccgctcccaaaggtttcaagatcttgatcgcccgaccaatgtcttccggagacagggtcccgtccggctcgtcacgcaattggtgaagctttttgagcaggtcgttcatctccatcatcccgccattacgatcccgattggatacgcagacatcaacgagttggaccgcgagctggtacgtccaatcactcatcccgagcatatccccccagaggccagccttgccctgactcctggctcctccaccgatcaacgggtccactccgatcgccgcacacatcttttgaaactgatgtctcaatgcggggtcctttttgatgtccgcattgtgggctttggaaaagctgactaaggctgatcggaaagattccaactgtgatttcagttcagtgatctgttgggtcgagatcgaattggaaaggttggcgtattgagcggtcgaggctgattgcctggaaaggccagatatgccgacgctgcgacgcatttcaggacgagatgatgatgatgatgcgacacacgaggcctttctcttattactatctagccaaaaccttgcgattacgaggactcaacgctggatgtatcaggatcgttgccaggcgatggaacgctgaggacatggagtaggcgatccagacaatcagacaagtccctgaagtgtcaaggacatgcaagccaaggtctcgacttcattacgtcacgtcacgtacgctatcacgcgtcgactagcgactcgactttggttgggatccggttcgtctttgaactttctcaacagatcacactcttactctgtgtagccactactacataccttggctgcttttcaattgctgaaccttcgtactgtcgattagtcccggacaaaatagctgtccattaccttgactgtctggcctgcttaaaatgttggacgaagaccaaggattgaatgccgacgactttgacaccatagtgctgggcacgggtttggccgagagcatcatcgcggcgtaagctgtcttaccttcatatcagtatgcctacagagatattgatcggaaccatttgacccttttggtagatccctcgccaaatcgtctgaaaaggttctgcacatcgaccctttcccgacttatggaggacctcgacattcgtcgttaaccattcccgagctggtcacgcatctatcgaatttggagaacgcatcatatgaataccctcagcccgaacactctgtagctacttctcaggtcacattccggaaagaggtagagaacggcagccgggggcgccaatacgcaatctccctatacccagggttactaccagctcggggcaaattgatcgacacgctcatttcgagcggagtcagtggttatgtcggtttcaggatcgttgatggtgttggtctgctggagcaacctgtcgccccatccaatgacgaagttcaggaagttaatgggagtatcaagaaagtacccagctccaagggtcaggtgttcaaggacaagacgatgagcctgctggaaaagcggaaattgatgaaaatgttgatgttcgtcgccaacctggacgaaaccaaagcagaagacgaccctctaataaaaggtgagctgttgtgatgctacaatagattgttgaagatcgtaagctgaccaaagaacgtctccttgaaccaggcaagaccgagaaacactttgtgctcttcttgcaagaagcgtttgatctcccgttgcctatggctcgagatattgcctttggtatcgctcaatgttcgacaggagcaggtaggcaaagacttcacgtgctaaaccatgtcgttcctgaagtatcttgcgtcacctgcagaaccggcgttggtcacattgttgcgcatgcaacggtatctacgttccctatcgcggtattcgcccacctcttcattcctagtcgcacagttcggggggattggcgagattgtgcaaggcttctgccggagttgcgcagtttatggtgggacctacatcttgggagagatggccgagatcaggtcaggcaaggctacggaagatggcgttgaactccagatcaaggcgcaagaggatgctcttagggggaaacgtatcataggaacggacaaggctttgcgtcaagcgggtttgctcggtggttcgaagccaggcggggagggatcacgacgttctcattgcgtggccatcatctcgagtcttccccatacggtcaagtcagccttttccctaaagcaagcagaaagtcaagaagacaacgcaaacgatgacgaagtgcctggagatgacgtactgtacttgatcgtaccgccaacgggagatcaggaaggagaagaagtctcgagagtcttgttcatgggtagcgggacaggtagttgtccagaaggcgaatgtgagtctcgtccaaccaaggcttggcgtgaggaaagggcacacactactttccagctgaccggtcatatttcgaatcagatgtcatgtacatttcgagtccccgccggcccggtgaagacggttcggcgaaaaccttgctagaccggctcctcgtattgtcgtcgccgtcgccgttgtcaacagcaccgggcgagaccgagcagacacgtcctgtcgctgcgaacttgttgttcgtggcatgctacgacgcagactcgccttatgatctagccgaccggtccgccgagtcgacaggtcggctcatcagcctcgatgatacggtccgaacaaagctccgcgcaaagtggacggcatcgtgcgggtccgaatgggtggaggggatggattttgaggccgacttggcccagtctgtgctagacggcctgggcgtcgaggtgatcaacaagcgagaagaaggcgaggacgaaggggaagaagatggcacagggttctgagatgtctacggggatagaagggaccgaagatgaacgacagtgctcggggcgaatggtttcgccggcgattgtcttgcagaccgttgaaacaaccctcggaccgaggatgccgcgatctgctccgagatggcgcgtctaccccgcgtaccgccgatctcaagctccgggaacgatacggtcccgcaccggtattgtggggttggcagtcaagacgagagccaaaaggctggacctcggcacattccataacgattcgctgtcgattgtgaatccctaccggccaagacttgcccgtcggtaatggttcgctatttgcccgagaagtttccaggtgaccaatctcggaaaatggaatcctgacccacatgtagcatgtggcgggcgttctgtgtacttctcgagcagctcgctctcacatgttcattaggtctgcattcatacgcgctggtgcgccgaccggtcaaagttcggagcgaatccaaggtggctgaataatgtctgcgggccagagataccgaccgagggagggcgacgaggcaccatgccatgacagaacaatcggatttgatccctttgattttgaaaaaggccacgcagcggctgaaagcaaacaagggcctgatcagctgagcgcgagacacacgcaggcgaaagggagggagtggttgctacctgtcaagatcacatgagaaccaatgtgtcggtgtgtcctcctcgtcgcctcgcgaatcggggtcatttttcgtcgggtctgctgcttggcggttgcagaacagttgcaatcacggcgcaactttcccccacaaggttcgctccggatcttccgaccgcgtaccgaccagctgccagctgcatgctttgcctatggccgcatggcctatggtgaatctgacctgtatcgcattacccgagctttgactggcgaggtgcgagacgctcaacatctgcacatcgtcaacgatcgtccatgtatctcggataccatgtcttgatgaacggtgatatcgaccaatatcgatcgactacgaccgtgctaaagtgattccatatcccttcttgtggtcaactccgcgagcggcagtgtcccccgcagagtcccgcctgctcgcctcgtcgcccatatcttctccaaccgacgactgccatttgcatcacaccatcaacctcgtgactgttagcctctttgcccttgtcggtgaattgtcgtcagctcgacttttgaacttagcgtcggtggaccgacctactgtcgtccggacgacggtttcccctcaatccccgacgtattttcgcttcgacgccccacgggcacccgatgattcgacctagctctcttggaaagatgcagagtcgaccacatgataacaaggacctgcatcggcaaggcaatatatcgagggaacaggaggaagaacagttgcgagggcaacgtcaaatctacgagcagcaacagcagcagcaccaaagtacacaacaatcggcctctcgttcgaacttgccacatcgggagcctttctttcgattcttttcgtcgccaaacgtacaccaacataccgctcctgcggaagaaactcaagtgcgggccaagttggagcccctgagcacatccaccgcccactcgacgagtccccaagtttcggcgggtcaccagggtatggcgagttatagctatagcgccatggcgaggctgtcgatcaacaatgagggaaaggaagtcgaggccaaggatgggagattgccgtccatctttgcgaacggagagtatggcagtcgagacgattcgaggttcggtctgccaggtcgggggaatgatcgatcaccttcagggtcgggcggcagtagcccaaacctcgtgtctgtcagggagatgcaagagagggagagaagtgaagatggacatgcacgatccagacgaaggtccggactattttcgccagtacagaatgggcgtgaggacggaatgatcagcctgcctcctctgcggcacgggtttgcaccatcaagccccgggggcagcagcagcaatcacaatcatagtgaatcgaattatcatcgagaagaaggcggccgagtgacgggaccccagcggaccggtcgaccccactcccagtcggtttcgagcatgatcacctcaccctactcccactcggcaactccctccaccagctccctccttctgccctcaccttccggattgagcaatctccggcccagctttgcatactcgccgccgcgagcgaacaaggcccctccggcaggcccgacgagcgccaggggaaacgaattccctcggcttgagaggcacattagctccagctcgttaccgggcgagtcgtccggattcttgcgaccacatcattctttctttcccggtggcggattgagcatgttcacttcaaggtcgggcgactctcagcaggtagcgcatgagccttcggctggaaacgtcgaacattctccgccgcttgctgctgccccgattcctgctgcagcgaagaggggcaacatcgagcggctcttccgcgcagcgacgacgagaaagaagaggagctcgagtgacgcgagcaagaccaaaggagctttggccatgacggagatcaaagacgatgtggatgagcagctggagggtttcgcgggggaaggcaaggacggcaaagacctcgatcctagtgccgtgagaaggctcgcgcatctgcagtgcgaacagaggagacgagagtgagtgaaagcatagccagcatccgctgaagagggctctactaatcgacgatgacgcttccttctttgcaggagcattaacggcggattcgccacgttgagaagcatcctgcctgaaacgactgcagcggattccaaggccgccatcttgcaaaaaggtaaatccacagcctgacctatgtctatggtcattcgttagaccacatcgactgaacgtacaatatgtgccattttttactagccatcaactatattcaaaatcttgaacaagcagttcgcatgtcgggcgggcggttagatccggggatgactcggtcgcccagcttggccggtcaacctcgagcgccgaaacgagagcgacgatcgaccctgtccaactcgttttcagaagccatttctccccagcactatgctggcgatctcgcgcccggacaaggaaggcgaggaggtcagactgcttcgtcttcgacgacagacctggtggacgtcatcacggacaaggacgatgacgacacgatgaggatggacatggacgtacacgatgatatggcgatggccatgtcggatgacgacgaggccgatgaccggaggcgaagttacggtcgtctgaacggatcttcgaccacgctgttgcaacatcagcagcagcagcagcagcagcaacagcaccagcaacatcatcaacagcagcagtaccatccgaatcaccacgcatcgcatccgcacggagcgcaacctgctagtaacggaagcgggcacaagaagggtggattttctcccctcgaccttctcgtcggggtagccgaacaggcgcgacgagtgacggggaccgggaatcatagcaaatcgcacatcgaccaggcggggcatcacgtcaacaatagcaacatcaacgggtcacaagcgggtttagaaaagacgatgaaaacggggacgagagggtcttgggcacatatagaggtcggggatggtcgttgagccggcgaccaggtctgttttttttacatctatttctagtgaggctttgatttcagttcaattgggtcaggacgtggggcacgcggtgttcagcacgaaaaacgggttgtatatctttgggatgtatcggtcttgattgtaaagcgagaatgaatcggtttggaatgtagctacaaaagagcgcgttttaagtgtccagcccgcctgtgcacgccagtaacaacaagtttggctcagagaagtttagctgctggttgtactgagtttctcgctcgttcacgcgcaggtttcctcacgagagttcaagcattccgggactccttgctgaagttctttctgaagcccgctatacgagcttttgaggatcgaacggcttgaggagagcacgcataggaatcccacagtaccaagtttccagtcttcgatcacttgttccacggagaccctcggcctggatccgacccgtcgcttggggtcgctcggtatactatctgaatcgcccgaaacaaggcacacaacttctcgcttattctgggccgggggaacgcaacatgtcagccatcccgatggatttcgatgcgcgagacatcatgcgaggccgccctaggtcttggacagtttcgaaatctctcacagctgggcataattgcggcagcacagcagctacgtctgctattgctgcgagctgctattgctacgtaaaacgactacctgtgttaccgccacaagcaaagctagtaaccgctgatctctaggtcccggtatccctgaacgctgacctctggtcaaagagtccgggatttgggggagatgcgtgaaccctgtgagactgtcgggatcagcctcgatcacgtccggtcgtggacgcgcggtggcgtcataagagacgtcatcggtggatcgccgggggtcaaatcgaggggaagtgcgggtggcagaaggtggagggcggcagggatcagacaggatccgagaggtccgtgatgatatgcgagcgggacttgtttgcatctcgttaatccccacgtttgcgagaccctatggtccttcgggcgagaggacggtggaatcggtgcgtgtgacatcacccccaacgtatcgttgtgctcaccgcccgttgccgccaacctggagcaaatgaggggatgaacggttcgggctgattcgttgtcgatcacttcctatcgggatctgcacacaaccctctcagcctgatcccgcacatccaacctcatctacttccttgtccctcttctctgtgatctgttactcccttttatcctgaagcggcaagagaacaacgcacgcctcgggcgaaacccaccatgaccgacatcatgagcatcatcaacacattgcggtggtcgacgtcgtcgcacgccctcagcccatatgtacaagagccaagtaagattcgagagactttgtacggccggctgtttggcatcactgtcatctactttgacacaaccaatcaattccataattccctcgtccacttcgaaacgtaaacatacatcaataacacctcataataacaaaatgatctcttccatcaccctcctcaccgcgatcgctgccttggccgccaaaggcgtcaatgccgttgccatccaggctattcagcagaacgacaactgtctccagatcgacggaactcccgccgtcggatccgaggtcattctcagcggttgcaaccccgagaacgttaggtcggccactcagaccaaccagcaatggtccatctcggcaggcaacaacaacgccgtccagcttttgggaactctgctctgtatggatgctggctcggatacccctgaccagactcttcggtgggttctctgtagaacgcaaattcctttcagcctacctcgcttacctgatacgttctgtcggtcccacttgcagactcgccgtgtgcaacggctcgccctcgcaaaccttctacttgaccgatgatcgccacatgtgagccgcatttgccctccaattccgaggcagatgtacgtgaagactgacttggtcgagtagcgccatcaccggtggaaaccaatgcttgaaggtcgaggacaacaccgccgtcaccaccacttgcggcggagctgaccagcccgaacaggtatgtcctggcgcgacgtacagcccggaaaagcgctaacgatcccgttgactagttcttcaactttgatctcttgttcgacaccgagaccgcgaccgccctcgtatcggcgcccaccaccctccctgccggtgccaccaacaccggagctgtcatcggtggcggtgctggagcttccaccgcctcgggcagccaaggtgtcctctcttccgcggcctcctcgatcgcctctgcggtcaactcggctgctccctcgaccggagccggtggcgctgctggtggaatcgtctctgttgtcactagcggtaccggtgctctcgccagtaccaccgctaccggtaccggtgtcaacggaggcgccggtggagttgtctcaggagctaccggtaccatgaccggtgctatgaccggtgctatgggaaccgctgcttcgggaaccggtgccaacgctagcggcgccaacgccagtggtgctggcgcaagcggtgctagcggtgccgcctctaccaccgagaccgttactactaccggagccggcggtgttgctactaccagtgagcattgacactgtctcgtattcagacgtagcaagacgagctgatcgttcccttgcccatgaacagtcacccgaatccccactcagtcggttgcttcgctcctgaactcgcttgccagcagtgccagcagcgacgtcgccgctgctatcagctcgctcgtccccctgaacagtgccgttggggagatcaacttgagcagggctgccctcgtcctctccgccatcgccgttggcgccgccatggtcatctaagcgcactgccgacaacttgaatcggcttggaccttttctcctccgggttctttatgtgcatctagttgaggagacgcggccttgcatcccatcataataccaaagcatatcatcatcagactgtaatcaaacgcacagcacatacacgaaagcattataattggcagtttcctgtattttgggcctgagtaccacatgttccttggcagatggttgtctacggatttgacggacgatccgaaacggtctgggggactgagtagccgacgagtgcgagtaaccggaagtaaagtcgcggccgaggggccccgtcgaattacgcgcaacatggggcctgagcgagtacatcaaggtgatgatgttaaatgtgtacagctacagaagcatttcagcctcgtcacttcaacctccaattctgtcgctttccatttatcaacccagcaaatatgatcttcgaatctccggatcccgtacccactctgcctccctccgggcgaatcgtctacgaccacgtcctgcctcaaaagaccgcgttcgatcccaattcgccggcgttcatcgatgggatcacagggagagtcgtgactcgagcagaacttcgacgggataccctgcgactcggtcagggtattcatgagctcaggtcttccagccttgacctgggggctaaggaaccagtcgccatgattttctcgcccaacacgatggactatccgtttctcttccttggtagccaagccgcgggatgcatctcctcgctcgtcaacgcttcctacttgatggacgaactcgctcatcaaatcagggacagcacgcccttcatgatctttattcatccgacgttgattgaaatcttagagtccgccttgcaattgttgaaggcggaaggttacaacacccgagcgatccgagtcttctcgtcgtcttccgaagcgattccatcggacaaggccgacaagccttacccgagctaccagacgctgtatgcccgaacgacgagcgaaacagctctaggatacaagggcagcgataagtcagcggcggatatcgacgagaccccagccgtactatgctacagctctggtacagtgagtcgaaaaggtccccacgcttccaacccgtccgagatcacatgaccccctcgtccgcctcacgcacccccttcggccgtcaaacgcgcgtgacgagtcttgaagcgcttggctgatcaccgaacccttcactcgatatctcagacgggaagatcaaagggcgtcgtcaccaccaacaaaaacttcaactatttgtctgcgctctggagtgcacatgtgaatgggtacaaggtgtcgccagagaaggacaagtatgtgtcggtcttgccattctatcgtgagtgtggttcgagggaaacgatcgggagaaggaagttcggaagctgaggatttcatggacgtcgcgtagatatctatgggctgcttcagtaggttattccggtgatacactgttacgcaactttgactggagttgaccgattttcttcccgcagaatcctgatcgctccgctcgtggagggcgttcctgcagtcatcttgccgagattcctacccgagacgttcctggacgctgtatctcgttaccgcatcaccatcgggatcgtggtcccgcccatcctcttgatgttggctcatcatcctctggtagcgaagcacgatctgagctcgcttcagatgctcatgtcagctgcggccccgctcggagaaggcctgacgaaccaggtactcgaaagactcagaaagcaagggggttccagggccaaagggctcaagattacccaggcttacggtttgactgagacgacgggagctagcgtcagtctcaagatgcagtatgtcgagaagaagtttggctcggtcgggacgccgtatgcgactttccagtacaaggtggtaggcgacgagggacaagatttggctcctggcgagacgggagaactctgcatgaggggacctgggatcatgcaaggctattggaggaacaagaaggcgacggaagagaccttcttgccgggacccgatcgctggttcaaaactggtgatagcgtacacattgacaaggacggatttatatagtgagcctgctgaagagggtttgcatgctctgttccaaccccgggctgatacccgtttctgttgacagcatcgtcgatcgtatcaaggaattgatcaagtacaaaggattccaggtcgccccggccgacctcgagtcgctcttggttactcatcccaaagtcgacgatgtggcggtgatcggtatctattcggacgagcacgctaccgagctacctagagcctacgtcgtgctgtcaaaggatgtttcgaatcaggcagaagcgacccaagagatcgccgactgggtggccaagcaggtgagacactggcggaacgcggttccgggggaaccaccgagctgatcccgatatgcaggtcgctggacataaacggttgcgaggtggagttatcccaatagatgccatcccaaagaggtaagtcgacgagggacaagccgacagggtgtttcttcgcgctgatgcttacgcccatttgcagcgcggcgggcaagacattgcgtcgacagttgagactgctctcggacgccaagccgtcgactatgacatcccaaccttcgcgagccagtaagctatgaacgagaatttgagaggtgttaggtctgatagggaattcgaaacaagaaatcatggttgtatatgcatatgaatcgcaatgtcagagtttcttggcgctttgtacatctcgccgtggtgtgcctgcgaactgtcttttgaccgtcctttgctgtttcgtcgttctcctccgagacacatcttgtagtggccggagcgagatgataaggaagccctgcactttagaggcgtgggtgcatcactcgagacatgaggtacggagcttctgcattcttcgggttgatgaggtcttgtttcgactcctaccaacgtaaaatccgtcttcttggattagggccccaaggcaacaagaccaaccttgttcttgtttcttgcgaatggtagacggcttggcttgccagtaatggttagccgcctgactataacggaacttagcggttgcaagattgcacctacaaggtttgaagcgataactttgcaaaatgccgaggcgacggtcgaggtcccacagagcatagcctcaactcaagcttttcgagaggacaggtcataaagtttggttgttaagtttcgagcctcgcaaagcctggagctggaagctcgtccatcagagcaccatagaccttcgatcagacagattgtgacctattcaccgatccgctttggcaccttgggctgcgacgaggtgaatccagacccagatacgacttttcgccaaacgctcgcattgcccccaggtctgacgtacagaaccgttcagtagatctaacccaatggcgctgccgtttgcagtcgcctaaaggcgagggttatctcactcggtagtcattgccccgatcgctcttagggtggcggaaattttggcattgcaagggttcctgggcaatgctactggaaacggtcaagatctgaacactgcggttgtgtagacagtaaacgttgaactctgtcacaggatgacaaactgattgcagaatttcgtgtcacagcctcctgtgccgatgatatgtatatcgttgctaacaggaagattacacaccattcccttccgccacacgacgagtaaacgggcgccaagaggggatgagtcggtcctgcatcttgcctatgcaagggggagctcactcatgctctggttccaacgcatcaatgtcagccagaatacgagctacaacgagcctcctcactttgaccaacttcgatgcgactgcccccggactggctgatgtcctgcaaggagtctgtcgtttcatcaacatgtctagcaaacacatcatagcccgaaaaacacgtgtacgcacatatactgagggatttgtagttggatgcagtacattgttatcaaaccatgacctgcgcaaaagtataatttgaggacccgacagaataccttgacgctcaacttgacgattccagccaggttgaagccgaaattttgcgcagcgacggctgctggcattcgagtgctaccagttcatattttcgcatagaagatacaacagttaattcaaaacgtgggtctgtcgtttatgtcaattctcaatgaagcgctgacactcgaggagaagcagcgtacgcgatcaccaagatcgggtcagggtatacgttgcgttgcgcctgaggctaccaaagttgaaacgctgactgagccgagcattcagatactgcaagagctcgaattcaaatgtccgacacagctcatgaaccgtttgtgagtacatgcagctgcgtatgactaatatcatcagacaactaacctctgccgtattcagagcgccgggtatgacacggtgctaccgagcagtaggtcgtcaaacgggtgagatctgacccaacgcacgccttgccttgccaaaattcaaggatctctccgcgcacgttcaggaccaagatgaatagtctcgaggcttgagaataaggatgaggaccagggtgtgaagaagcaggccaagtagaggctgatggagaccgaccgcatgcggtgagaggccatcgaggttgagggtttagcgacttgaaacgcaacgcgcgcctttcatcgactttgtcaacaaacctctcgatcttgatcatcaccagatcgaatgtcacccgagcaatgttgttcaagtcgagatcgaccccgacagcgttgtaccaagtgaccaacagacgcttacattattgacagcgaaacaaccatcaagatgacctcggatcccaccaaatgtaccgtgctctacaaaatcctgaccccggacgagcatgcgggtctccctacctcggcctggaagggtacctcgctcgacgtgagatctaattgccagctggatgtggacgacgaacgctgaccaccgacacggtttgccgtccctcgcacctcaacggctctccagctcaatgacgggttcatccacctatctacctcgagccaggttcccctgacgctcgaacggttcttcaaccgggactttttcccgggggacgacctcgtgctcggggtcatcccgcgtacatcgatcgacgtcgaggacaagctaaagtttgacgagtctgcgcatggagatcggttcgggcatgtctacggggtgagcttcagggcaactttttctttcctgagcgaagggggggtgcaacgagctgatcgttgcttttcccggtcgttcgaccgacgtgtagaccatcgacccgagcaaggatttcgtcaaggagcacaagatctcgcgaggttcggacggcaagtttcagctccccgagctagagttctaggtggtgtcagatcgcagtgcaggactggttggtgcatagtgcacagtaaaaagtcgtagttgggccagagaggcgattggacgagaacgtaaacactgggtgcgacgcgaaatgaccaccatatggcgaataacaccgcccttcacactatctgatgcacgtcgtcaaaggcacgagcgagccaactgaatcggaaaacagaagccatcactacggtcaacaccggacaagactcttgcctctcgggctcgttcgtggtcatggtgaacggagctgtgggtggtgcatctgtatatatgcgtcgtcttcgtgcgtccctctcttcagcaactacaacccgactcgtgagctcgccccactctactcttcggggacctcgaccgaaccgtcgtcgattccctcgatgacgtcgtgagggttcttcctgtcgacggtgcatccgaccgactgggcggttccaaggatctccttgacggtaccggcaaggttcttggcgagcgacttgtgctgcatctttcgggcgatctgcaagtgaggcggggtgacaagcagggatgagcgattgcgaccccgatgagagccgagacgcggcgggccggcgcgcgggacttaccgagacgatctcgtcgaacgaaacgttaccagtgtgcttgatgttcttctccttctttcggtctcggggaggctccttcaaggccttgatgaccaaactcgaagcgctggggacgacgctgaccttggcttgacggttctggatggtcaactggacggtgactcggagacccttccagtcaccggtggccttggcgatatcttcaccgaccttcttgggggactatgacagggcgggacgaggggtggtgtaagtacgcggcacgaggggcgatcgtcactggcccgcgggggtcttatgatggaacgtaccaaacccaaaggaccgatcttgggggccaaagcggacgaagctccgacctcacctccggtcgctcggaggtagatgatctgcgggaaggaggcaacgaaggacgggtcgagcgagtcagtacggagtttcgataagcagcgagtccgcaaggcgaggggtgtttggggggagcaccagctgatgcaggtgttagataacggatgcggcggcgggtctagggtagctcgaaacgaggcacgagacaaacgggtctctcgagtgaacgagcgggagtctgcgtgtgtgcgtatgtgtgtgcgtgtgtgtgtgcgtgtgcgtgtgccctctagtgcgtagtatcagaatgcatccatgtaaagagccatcgtctttgtcgtcgtcgtcgtcatcgtcgtggtcatcttcttgaaccaatatcgttcccatgtcctcgaacccggcgaaaccggcgcaagactttgtttgtccccccatcggatcgtgcggattgactgtcgataccaggccgaatgagaccagatccagatccaactcggatggattggcatttcccgaaagacttcgggatgtcgacccgatatgcgcgctgggttcttttcaggagccaaacgtccatgcactttcatccggcgagccagcgttggatttttttcccagagcaggtcgacccagcgggaagagtatggaatggaatggatgatgaagccggggcgtattccagagtaggtgaagagcacgggcgaccgatcatccaggctcggtggaccgccctggagcgcgtgatatcgacgaggatggttgggttgatagagccggtggatgggacgtcgataccgataccgataccgatgaatcgttcaccggctggtcgtccgggttgtactgtccgttctctcgtctcgtttcgtttcgaaactttccatcccgtccgatgatcctcctctggcggttcgtgggcgtcgtcgtcctcgtaatcctgctcctgctcctgtcgatcttgatcccatgcacacacacaaacacacacgcacgcacacacagacaaaactcgcccccgactcgtcctaccgagctcgtcctcgccatctcaacctgaaccccccgcgcatccaacatccaacatcccgacatcccagctcggctcagctgagctgtataaagacctagacccaccttgatctcgttggggtcgatcttgggggccattttgaaaagaagagagagagtgtcgggatggatctaacttttgactagagcaacaggcagagcgagtgcaggaagaaggggtgggggttggaggaggtcgatatcaaaccgatgtagatgaggggggatctccgacgacgacgaggacggggaggatcgattgaggggctgtgggtcggggacgagggacctgggctaggactaggactaggactaggtctgggtctgggtctgggtcgtacggtgaggtccaaggttgggtcgggggtctggctgggtgcggggggcgttggctgagagggcgacaagctgggtgggtttcgcaggtgcaggcagggtgtgagtggtatggtgggtgggtgggtgtaattggaagcgcaaacgagaggaatgccggcatctccctcgaagcgcgcagctacccctgaggccgtggtggtggtggtggtcgtcggtgacaataatccaccggagaggaagcgcaagtcgcgcgcggacgaggggcagtgaacagtcgtagtaggacaagcaagcgcacatgctggcttctccggcatatcatgcgcttctttgtgggattactctgttcatcccttgcgtgacctgttactcgcgtcgaccggggcgggcgtgtgttggctgggctgggatgttggctcgctaactctggctaccagctacccagccaggcgggttcacccaagcaagggtcactgtcactgtcacggtcacggtcaccgatcgcacccacccaaccaaccaaccaaccaaccactctgcccagcttcactctacccagctagccaggactcaccacctcactctcctgccgttcgccccttgccctctggcctcctgcgttgcgatacccatcgtcgcaagatccatcaacctcatacgcacccccatcccttcccaattccttcacccatcaagacacttcccccgtccgtaggctcacccaccccaaaaagaaaaaggaaagaagcaacgccaggcgtcccctttttttcgaaaaactctctctcttcaaccatgtctgaatctctcgtctacaagggatccctcgagggacacggaggatgggtcaccgccatcgctaccagctcggagaacccggacatgatcttgaccgcttccaggggtgcgtaagaacgattccagagagaaaggcagagagagagagagagagagggcagaggagattgggtcgatgggaggtcggagcgatgaacggcggtccagagctgaaacagatggcgacgagtcggaacgacgagagagacgatttcgaagcgttcggtggttagggaaaaaaaggcaggatgacggtcgagctcggatcgttcccccgccaacgaccgacgattcgtctcgagagagatcgcgggtcgatcgtcgtctcttttcttgctcgtcgagggtcttcctgtcctcttgccgctcgaggtcgtcgtttatcactcgacccatcatctgcccgtgctccacatctcattccatcacctcgtcgtccccccaaatcttctctcgccgtccgctcccttcccacgagcgaaaaaagtggagaaacctctgaactgacacctcgttccctcttctcgtcgtcgtcacttttttagacaagagcatcatcgtctggcaactcacccgtgatgacagcgagtacggtttccccaagaagatcttgaagggacacaaccactttgtctcggacgtcgtcatctcttccgacggtgagttcgtcggtcgtcgtcgacgctgagacatcccatagctgacctcgacccgactcgactcgactcgcaggccaattcgccctctcttcgtcgtgggaccacactctccgactctgggacctcaacaccggatcgaccacccgtcgattcgtcggacacaccaacgacgtcctctcggtctcgttctcggccgacaacaggcagatcgtctcggcctcgagggacaagaccatcaagctctggaacactttgggagagtgcaagtttgacatcaaggaggagggtcactcggagtggtgagtcgaagcgtgtcaaggcgtgtcgaggggaagagggagttcgacccaggctgacgtacgatcccggtcgcgttcagggtctcgtgcgtccgattctcgcccaaccctgccaaccccgtcatcgtctctgccggttgggacaaggtcgtcaaggtgagcgtcggtcgtccgtctcgttactcgatctgttttctctcgtccacccccgtcacctcgttccaaacacatacaaacgagtcttcctcgcggaaatgcactcaccaaccacacgccctcgtcatcatgatgactcgatatatatttgctacttcagaggggtgaaacagacccgatgagaccatctttatccaccaagatctctgaccgatcgaggagtaatacaccttttgcctatccccctttctcgactcccaccctgacctcggacctagacctctttgacaatccgcgtgtactgacctgatcctccgtgttgtgccctcgacgactaggtctgggagttgtccaaatgcaagctcaagaccaaccaccacggacacaccggatacatcaacaccctctcggtctcgcccgacggttccttggccgcttccggtggcaaggacggtatcaccatgctctgggacttgaacgagggcaaacacttgtactcgttggaggccggtgacattgtcaacgccttggtcttctcccccaacaggtactggttgtgcgccgccaccgcctcgtgcatcaagatcttcgacttggagtccaagtcgatcgtcgacgagctcaagcccgactcgttgtccaacgacaacaccaagtcccccgaggccatctcgctcgcttggtccgctgacggtcagaccctctttgccggtctttccgacaacaccgtccgagtctggaccgtcgtataattgcgaaacagcgcatgaaatatcgaccggagcagccaagacgacgacgaggacgaggacgagggatggaaaagggatgtgggatgagggaaagaggcgcgggtcgattgtgtctcttttctgtagtgtaatcgttttccaaaacgaagatgagatgtgtccgccccgcctcatgatcgtacccgtcccgtcaccggctcgtccattgtcagaatcgtttccgactcggctttcagatggcagcttgcgattgcctaccctgtcttggcagtgaggtaggaaggtgtcttcggggtatttgcgggcgaggtagtggtgttcctagacgtgtcgcgtgattcgaccactttgccgtgcgggccggtgggtggtctcgtcgacctggccagccactactgtgcaacgactcgtcgtcaggttagctcgcatgacctcatttttccggtcatccctctgctggtcattcgggcccgtacgtacttggaagagaaccactccgggacaagagctataccgataaagctccgatccgcaacgcattgcgcgctaggcccattttctctcgttcgtcctcatccgtggcgcatcggtctgacgatatggtgcatctctcgttttactcgcccccgatgtcacatctcctgttagactagacaggcccaatactaattgtcccccggattgtgaaccagggcgctaacgacggacgaatttttgcttcggatgaaacgaaatcgctccgggaaaaaggtacactacatcgtaggcccctccttctccatgtttctccgcaaacgaagtccgaatccaggatgccaactctggggttcgagctatatagtctcgagcccttgagagtttcaaggatggtgttcctttggcaatgtcgatagagcctctccatccatcaattccaagaacctcataccagtatgctgtggaaatccgtcgccgcactctctaccttggccgttacggccctcgggttcaaggtgagatccaaactggccgttacaaaatttccctttggctttcatacaactgacactttgaaacacccgaaccgctcttagaacccgttgaaggactttaacggatcgtgagtccggtcctagctgccgcgcgttgccgccgtcgctgacaaggtctatttactgcatacagcgatccccaaatgcaatactggggcgggaactactacctgttaaccactacatggactcatattgccatcaccacgtctcctaccctcgagggattgaagaccgccgagcccaagattgttcactcttctgacgacccatctaggtgttgtaacctttgggcgtgagtcggtcgcatagcacgcctgcacgtcacaatcgctgatatgatccccacgatatatcaggccggaaatgcactatatcgatggcaactggaggatgtgagtcggaatacgtgtcttgctaccgttccctcatcgctgagcgcgatttcccgtatctcagctactacactgccggtaccaacggaaccttcgataaccaattcactcacgttctcaagggtggtcaaaatcctctcgatacttacgaatatgagggtgagaaatcgcaattttggatacgttcgctaacattcgacgcgctgacaaggtccttgctccctgcagaccgtgtcgtcatgaccggccgtgacgtctgggcgatcgattcaaccatcctccagatggactatggaaacttcttgatctactcttcttgggaccccaatacccctcctcccccagggaaggctgacgaccgagaccaatgtctttacattgcgtgagttgcggttgagacttggcgatctaccctgagcgtgttggtctgacattgtggtaaacaggaacatgacctctcccaccaccgtcggtcgatccgtcaagatttctgccccgacttacgagtgagtacatcattcggagtgaaataaccgactacgaggctaagatttcgtttatagctgggagactgtcggaactcgagtcaatgagggtgcttacccgctgtatcatgacggccgaactttcctcagctactcagctgccggtaagctctattccttttccagtggtcgcttccaccggaccgcgctcattgtagaccaaatgcatcaatctcaaaggctgtgctggaggcgagtacaaactcggtctcctagaactgatcgatggaaaccccatgtccccttgctcttggaagaagtaccccgagccggtctttagcgcgaagaacgggacttatgcgccaggacataatgccaacttttactcgccagacggcaaggagacttggaacgtataccatgctgtaagtctgagtgtatggaagagtgaatacgacatccgactgacatcgtcggattgcgtctctctacgaatacagaacaaggtaggtctttcgccgtattgcaggcgtatcgagtcaaaagggaggtcactgactgatttcctcgacatgctcttggtaggacgttgctggatccttgctgtgtgacggcgctcgtgatacccgggctcagatcatcacctggtaagcagtcgcgtgctaaaacgtacctgtcataggtacgggtgagactgatagacgaatcccgtcgacgcgtgcttctaggggtgaagatgggcttcccaactacggagaacctttgcctctcgatgttgagatcagtcctccttccggcgaagcgtcagctcgaggataccaagtgtagagcatcgattagactaagccggactgaagcgaacggaaacgagcgaaacggaaagcttcggaatcagatcataatcactttgtcaaaggaatacaagatgcagctcatgttatcttggcaatcgcgctgtatcgagacatgttgcagataaccgatgggcatgtaacgaatttgctagaagtagcttatcaatcatccacaatgcacgttgttggacgagctgacttgttcgtgtttcaagtctcgatggcctcacggtcaggacatcttggtgacgaagcggcgaaatgacgcgccgcatcaaagtggaggggaggacgcggccagatcccacggaaccaaattagcgatcgaaatgaaattctcccgaattgataaccgtccgcgcgcgctaaaaagttgatggctaatccaaacggttctccaccgaaacttattcagcaaatcgttcagctgttttatcggtcagctaggttgttcgttgcaagtcggacatatatacaggacagtcttcggccggttgaacctggaacgtacttgacagagttgttcaaagccaaacctttcttaccaaaccgcactctaccatcgagttcgatcgaacgttcccgttatacctccaccttttttgatcgaaaactttcaccgcgcaccaggatatcgcagcatcatgctcgacatcgtccgggaagcccctttgggcatgctcctcaatatgctgacgggagatagagccttccgacatccagaagacagaccaggtttcgagtggaccccaagctcgttgaaattcgtagaaaagcggtcacccactcagtcgatcgccgatgagagcttggccgtgactcccgcgtcgacaaagaatgaatcgctcgtcgatccggtggatactttgaaccagctggatccattgacagtgatcgactggtatgacgacaaagatccggatgacccatagtgagttcaagtcttgtacgatgtctggacggaatcggaagctaatcttggggtctcccagtaattggtccatggtgaaaaaatgcttcgtagccggacagatcatgttgatgactttcgcagtctacggaggaagctcgtgagttgctgtagcgctgtatggctggcgttagctgggccaagctgacttggtgccgatatggttgatcccccagaatttacactgcgtcaatccccgggatcatggaggaatttaacgtaggcgtcgtcacggggacagccgggctgtctctatatgttcttggatactctttcggtgggttgtcgttagaaatttgacagtattgctgtcgactgaccgatgcagcatcgaattcctctctataggtccgatgcttctcgctcccttgcaagaactgccgaaatatggaaggaacccgatctacatgtcaaccctcttcatctacgttctctttgtcatcgcttccgccgtagcgagcaacatcgagactatcttggtagctagattctttgccggtttctttggatcgccggtgttggccacaggaggtcagtctgccttgatagatgccccaagctgacaaaagccgctgacaccagtcgcttgtccatgactacagcggccagtatcgcggacgtcttcggaaacaaacctctgatgatcccggctgcggttgggctttatgctattggagcggttctcggggtgagttgtcatcctcgacccgatcttgtcgcaagaccgtccatgctcactctggctgtgtatttagcctacccttactcctttcatcggaggattcgcagccatgaggttcggctggacagctcccaactggatactcgcgggagtttctggccttgcctttgtcgtcctcttcgtcttcttccccgagacccaccgccccaatgtcttgtaccgtcgctccaggagactcagacgtatcactggaaacacggctctcaggccgaggctcatggggaataacaagaaattgagcatcaaggagactctttggttgcccataggaatctcgctcgagcctgcccctttgctcttgggtgtctacctgggtgggtcttaggtgtgattaagtcgtgccggtgatacgaggctgatcgacgggtaatcacgaataggctttgtctacgctctgttctacgtgagtctgaccaagtgacgatcggctgggagtggaggctgacgcaagaatatcctatccagttgttcttcgagagcttccctcttgtctttggtaatatctacgggtccaacctcggagaacaaggtctggcctttttgggtgagtcttgtgcgacgaccttatacggcctgccgctgataaacccgctccacaacctaaaggctacctggtgaccgcctttttcacctatatcacctatgtcctctatctgaggtaccggatccgacccctcagcgactcgggccgcatgacccctgaagacaggcttgaaatagggttgatcgcttctgtcttgattcccgtatcgaccttgatttatggtcagtttaaaccgacatgcccaagcagcaagtatgaacgaggcttagacttgacattcaactcaggctggaccgcccgggaatctgttcattggatcgtgcctgtgatcggagccagtctctatctacctgggtaagcaggagcgtagggagacttctcgaagggatgatcaactgacagcccggaaattgccagtgtctacctgatcttccaatcgatcctcatttacgttgggacttcttatgcgaccttcgcagccagcgcgttggctggtaacacattgctacgatctgtaatcgcttcagtctttccgtgagtccttgcgcctcaatctggttgccacaactagctcctgacttggtcgtcgccctaaaaagcttgttcgggcatgccttttatgaaaacttgggcttggggccaggatccagcctgctagcgggaatctcgatcatcttgatcttccccctttgggtacgctttattcgacctatcgagcacatgaccttgaaactgattttctgttcatctccagttaatcaagaagcacggagccacactacgagccaaatccaagtatagcgattacgacccggacgcggtggtaactgcacactagacgtgcaatgactctcaagctagattccaggattgcaaagcccaatacactgtatcacttaattagacctctgccttgcctataataacgatactcatcgccatgttggaacatcatcgcgggatcgcagaagccgatcaaaactgttagcgttacacggacatgacatccgttggtcagtcggtcagcacaagcgcaccaatgaaccacgctcgaggcttgcgtaatcaacccactgtccaagctaataactggcattgtaatttgggtttacaactgggggatatgcaatgggaggtgacgcgtttgcgaaacatcgatgtggcgtggtatatacaaaatgtcgtttttctatgcttcgtttttcttttctgcctgagattgtccatgatttcacccctatttgtccggagcagcgaagcgttcgggcattcgccgccgaacccttcttctgacacgccattcggcccaaccctgcggagcgttgcctggtcagtaacgttcttctactgttgggtcgaacaaagaagctcagatgcttacatagatggccgcgtccactagtccgacgctaagcacaaaccatagcgagaccatagtcatgaccggatttggcttgtgagtgatcatgtcgtagagtagccgtaccaacgagaaggtgaagactatcagataggccagtggaaagtagagcatgagcagggaggcttgtcgattgaaatatgaagcagcggaatgcctcgggtccaggtcatcatcatcatcgtttctgccccgctgttccagctcctcaagcggtggctggttttgtgcgaagaattcgtgcaacgtttgatggtttgggtccttatcgttgtgatcaaaagaagcatcgtcgtcttcactgctgtccagacttttgccagtcgatgagcttggcaatggcattaaggtgttcctcctctcgtcctgcatgatcgcttcgtgatcgatcgacactcgtcggcttgtaccattgtaaggtagattataagaagaagcggtcgccgaagatgtcatgccattgaaaggactgccgctcatgagctgtcctttctgaggtgttgtgggcgttccggccggtaacgagggctgagccgaaccccgtcgagaatggatggcctgaccttctgggatgtggcccagaccgcgatcggtgtcgaccataatgtgttcttcttgttgctcgccatccgagctactttttcggtccgtctcatccgactccatgtatactagacacgattcatcgaccaaggttgtaccggtgtcttttctaacccgctccagcgagttgtccgtctcgctcataggaataggaaagcctgaagggaatggctctaaaggttgaaccaaaagcccgccgacattgttgatatataatttttcccagggaggaatatcatctttaacgtctttggattgccaacctgcatctcctgccgagatcccggtcgcgagtttgaccttggtcttgacggtacggagaatgccctcactgaattggccttgatcagacactgatcctgtggtggatgacacttggatcgtatcgggtcgccgaaggaagcggaacagttgactatagagaacgatgacgacaacgaagacggacgccctgttgcatttagagatgtatgaggtcaggtctcgcaaatagccgagattttgacggcggagcaccgacatacctcggaatgaactggaccagagccctatcgtttttgtgaccacccgaaccgtagtagcagagcgaacccgcattcgagggcgcgaacccgatatatctccaccagactgtacaaagattcgaatccacataagtttcgagacggctctgagcgtctatgttcatgactcacgtccagaatgcagaatcgagatggtccagatcgcgatgggaataaacacccagtgacgatcgattctgtgggtgaatgcactcatagggtgtttctgagcagcgcgagacattgttatgtcaggtctttgcaagccgtcgtctgttattcccggacgaccgacgtaccaggagagcataggttgcgatggccaagaccatagtccacagatgttgggtgaagagaacggacgtgagaataaagccagcggcattctgttccgcggtagagaggtaacgttagggccgcgacgtgggttctggacgaggcgtcccgtcacgtacacaggctggggtgtcaagcttcatagggtgaccagctaggaaggcaatattgggtacggcgccaatgacactgcaccgccctcgaatgtcagtccggatcgagggggcaccatcaaatttgctcgcactgctcaccccaacgatagatcggaaatgaccatcccgaatagcaatctgactctgagcttggtaagaccttgcttcgacagtggtctcagcaagtatgcggaagccaggatcgtcaggcactcgatgaccatggcaccgatcgacgaagtcatggccattttgtccgagaacaacgcgccagggatcggcgacgtcgacatgttgatattgtgtgtgttatggaggtgtactgaaatgatgtaggttggatcgtccgcctcgtgatccacggatctaatcgctttccataagaaggacctcttgaaagttgtttgggatcaagccaaaggatggcagcagtcgaacaacggctcgatgatcaccagctgccgtaagacatcctttccaagcaaagaggtagcgttctcgacgatgaagcaatcacgaagttggggggatgtgaggctaccgtcttagtgttactaaggggacagacagcgttttcttgtcgagactgtctagttacgagtgctgatctacagcgggcaggcgggtgggacctagatctgcgtgggtggatcgtcgacacaggggggcgggattgatgaggctgattacgaaagcctcttgatgctttgatgggtagatcgtcgaaattatttgattgatcactcaatgatcacaatcgtccaggcggcctttcgtgaagggttgttggggtcgtatctctcgatctacgagaaacgctgaagatggcggctgactaggatgtccgggaagatggacttggtattggaacaggaatctcgacagcttccctgatccgaatttgggccgtggctggctatcacttgtgacgagggtggacaaaagcaaaacgatcgtcgcctcgctaggaaggaagcaagcaaacaagcatccatcatctctcgcgagatcccccggaaagtcgctcgcgtatgcccgcttgagatgtctgcccgggccctgcgcctccccctcaactctccgctcgcgatcgctcttcttttctggccgggtctcgcaaactcaggccaaaatcgaagctttcccagctttctaaaaaggcgtctcccgatccctggccgttcctactgtgagcgaatgcgtgacgacgaatgcactcctgagccgcggcccgtcaacgccgctcgcgtcgtcatgggatcgggcaccaccgatcacaagccatctgggaggacggctgcaaactcgtatcttccaaagccatccccaatcttcgtggcgacctcctgcacggagaatacttgccagacaagaggtcacaattggtcgggcggcatgcggcctctgcggcgaggatcatctgcggtatattgacagaacagcagaatttgatcggaatgttaaccgaggtacgcggcgagctgcggcgtatgagcagagttcgagaagtagatggcaggccaacatcattcgcatagcgtatagcttctcgatgtcatttgatgcccagcggcaacaatgcagatccatcatgaatgcagatccatcatgtatctgcatgaggtcttgcaattttgtcaaacgagtcacgttgcgtccctgtcaccaagaggcacaatgctacgctagcgaactccgagtctgaccatgaccagatcctagcctcttccggtcggttcacgatttgactgatacatgtgaacgtgctaggtagactcgtttggacctgcaccggtgtcaatagcacgatccacgtacgtccagcacgaccaccgaaactcgatgatgatatgacacacaaacacacgcccctcatggatcgatgacctatgtccatggatcagcgttctgagatctgggactccctccgaattttctgagatgagaggtcccgtcactctctgtcacacctcgtggattcgttaccggaacccggaccggatccagatcagatctacggccaatctcggttcccagcttccgagcaagccgtcaatgcaatttcgtctcagcctctcactttcgggggcgatctgtggatcccggggtagttgtcgctcacctcacccgacagatactcgacatcgttcgccatatccatgcattttgcttagtctgcgggctacgatccacggaggagtcacaggccacaggcgggttgggcgatccagagatcaggcatccgatgcgcgagacgatgagtcagacttcccggggcttctgtctcgggatagcctgatcagcatgacaagagagatgggagtgcaagatagatccgggtagagaagaccggccggccccggtcccgtcgtgactgtgagggcgcagacatcctttactgcacccttcctgttctcttattaccttccgatcagcgattatcgtcttcaaggcacagggcatacccagcggttctcctctcctgaattcccgttggcccgtgttgatattctgatgtcagatggacggctacagatagtgtctcccagctgaggtccgccgctcgataacaggctcccacatacataggcttgtatatgttcaccaagtcccggtattgataaaaaaatggactaataacaggcgagaccccgtcaagcgataacggcgaaacgatcgagacatgttacctccagattatgggccgcagaatacgcgggttggcaaggttagctcccccgaagcagagtcacgattcgccttccatttcgctacagccaattgaagagtccagctcattgtatccccggctgcttccccatggctgtccttgacacgaaaggtctggcagaagactgattacagagggctcgggcaggtcaactccgactgaacgtccgatagtattcacggatttgtggccagcggcctgatcgggatcgctggggaggatcctaaagcatgagcgttgtggccccgagatgctgcacattcgaatatcatctaatagttctcttgcatgggcggtccactgtggcattgagcctactgaataatgatcatccagctaaatacgaaatagaacaagaacaaagggtagacggccaggaatgatcgatcttcctggattttggtgccccccaaaaagttcatcgatgctaaaacatgatgatcacaggtaagcggtcgagcttggcgatcggacaaaagtcaggcggacgtaccccagacacaccaggcccacgctgccaagctgacgggtagtcgaatccagatgttgtgcagaacaaaggagacgatcgatgctactaaaaggggaaagaggcagtaaccgaggacgcactgcacacgaaatggtggtcagcttctctgcacccgaacgagcgcgagactgtgacttactagggattggaagaatgatctaatcgaaagcatcgtccggatttcgaggacagcgttcgagtcagcgaattcacacttggccactttgcgagctctcataaacttacactcgtcccccgagcaacttggcgttgacggtgacaatgaccgacccgatagtgaccaacgagatgaccatggagaagacctggatagattggttggcaggggactgaatccaaaggggcgatttcgcatgagctttatagctacagctgcactcagggccgtaagcgagaatgcaatattgaacttacgtcgatcgagagaatgatggcgagtgcgaggcagatgacgagtggcccccagagatcccattctctacaatcatggacgtcaggttactcggtttagtgttctggcaggctgcgtcacagcagatttgtagaaagctcaccggaggagctcgctgctaccaccttgcttgggaggatagagcacctgaagcaactttgcatagatcgacgaaaggtcacgcatctacgacaacgcaagaactcgattgagcattcgatcttgaatcagctgtggtactcccagtcctccttgactcactatcgtcaccgagacgggctcgtccaatgtgctttccccggtaaacctcgtttccgtcctaacacccccccagtcttcccttcgaccaccgcccggggtcgagccaatccttcctcctaaggggttgacgggttgcgaattaccggcacctgattgactggacgggttcaggggctctctggccgtagcgggtcctccaaaggagaggtcatctaggtcatcatcgtctgcttggctgggaggttgacaggtggtttagtgtccggtggtggttgccttgcaacaagcactgggcttacatgaattgcttctggttagtagacatgattggtggtagacgtgaagagctaaagagaatggattgagcaggcttcagaaagagatatgatgttatgatacttttgtgtacaggctcaggtagttagttgatggaattagcttccagatggacagcctcggtcaagttgagccgcgcaaggcagccaggctgggtcagactatacttacttcctgattagctaaatacgccgttactactactcgttcaaggccatagctcagtctcccagcctctacataccaaactagttcctccacagtctcctgtcatgaacaacgacatgtctgacttggacatggtcgcccaggccatggccactaccacacgcttgccgcaagatcaaagcgatgcacccgtggcccgggctaccgcctcggacgtgcccaacgatacggccttgaatggccctgggaacgaccagttacagtcaaacgggaacggaattccggatgatatcgccgagggtctcgccaagctatccgacgaggacaaggccacgcttggacctctgcttgagctcctggtatcccagggaacggacgagcgagacctcgaggatctcttgaaacagtttgatgcggcggacgatgtcgccgacaagctcgaagggaggctggatgatctgctggaaggcttgaagggggtggaaggagagttgggagctggacaaacggacgggcagacggcagatcggccggaagagatgacgacagaggccaaggcggcgtttggaggagacaaggcttgattgatgcaggacggatgtagagtaagggcggatcgaagaggaacgaccaacagatagttgtacttaacggaacgacacatttgaagaactgtatcgatgaaatggtcctgttttgagttgcttgatgcttgatgcatgattgaaagtccagctttgccagagtttcgtctgatcagaagagtcgcttaccctcggcgatccgagacgcgaggagaggggtgtaacggtcaagttggaacaactatcatgaccactctgaagctttatgatcgaggcatcttcctcagaaagacacggccaatctccccaagaccgctagacacttcgcatcatgtcagatatcggaccagctctaccaccgcacttgcagaaaagacgagcggccagccccgaggccgagccgaaaccgcaagccagtccttcagtggaagaggtcggacccgctcttcctcctcacatcctcgctgctaggaaagccaaagcagcccaagcttcgacatcgactgtcccccctcctgtcgctccacttaactcatcagagagtaaaaagacctacggtccgaccttgcccgtggctggtgcggcacctccagtttcacgcacagcttgtgcgaagtatggcgaagacgacgacgatgacgatgacgatgtaggacctaggccggagatggcatatcgtggggatcaaccaggggacgcggtcagggaattcctcgagagggaagagcgtgtgaataagttgagagaggttcgtcaagcctttctaaattgagcctggttgatgctcagaggctgaccttcggcgacctatttcaggaagctgaaaagcccaaagtcatgcaacgagaagaatggatgctggtaccccccgaagcttcggatctgctctcgagtcggtacagaagtttttgatcacaatcccgactctgctcacgattctcgctcgattacagagatggacccaacgaaattacgatcgagagggttctctgcaaggactgaagaagcgaacacggatatgagcgcgtggacagaatcaccagccgacgtgagtcttccgggtggatatgcacagcatgcctcttcccttgaaatccggctaaacgttgcctgcggttttcagaaattggacagactcaagaatggcaagagaaaggccaaagcggatgccgaggaggaggaggctgtgcacaggaagaagatgagggatagggagatccggagtacgatcgaccagcacaacgtgagtgtaccgcaagtgacccatggtagtgaagagactagcagagttgactgacctaccgttaacgtttcctgctacaggcgagccatcgggtatcgtcacttatggatcagcatgccaccgcggtcagcaacgctcccaagggtaaagaggtacccgtcgtctgggacagggacacgatgatgggcgtcaccggaaagatgatgggagaaaaggatcgatcgagccttatcaaggacgctcgcggtctgaacgaccggttcggacattccaagaccggcgcctacagccagatgtgaatgagtgggtatccatgctaatgtcatggtcgctgtcggctcatggccgtaatcagtattgtcgtcaatttacaagttgtactgttccctccgagtactggtgctgctgagaaagattaattcgcttgctactgtccttttggggcttgagttttcgcatagccatgagaaccgtgatcgaatcgatcagtttgtattcgacaaagatctgtaagtagccaagtcagcacagtcatacacgtcgtcacagcgccgaaacctaccatcaagtggtctctcatctcgaccccgagattatatttgacaagaaggtcatggtaccggtcaacccagtcgcatacgtatatccttccactatgaaccagaaggggactagtgacaaggtcataccgatcagaatttcgaagtctcccgagtgcgaggttgtatgcctggcttaccctttttcagcttgccacctattccacatgcacatgataaaatgtcgtttggaagagaactgcatcgtgataagagatcgttagcgagctgagcaccggaactttgcgtctggacaacctacatggacccagtcgcatatgatctgttcctccaaaataaattgatcagttcacgatcccgacagagcggtctagcgattgggactcacttcttctcgttcttgcaccagatgcatgtattcccctccttgccaaaacttatccagctcgtgtaatcggtccaggagggtgccgttttcgatccgattgctcgtgaagacagactctcctgccacgtccttcttggtccggcgtttgcgtatttgcaccgcaaaatagtcgaccggctcggcctcaatctttggatgttccctctgcatatggtgatgcagtctttcccacgagccaaagttcaaaggctcacaaagaggaagagggcaacaccatccggcgacgatcttctgctcgacgacctggatctgaggttcgttcgtggtttgtatggaaccgtcattggatttgaaggtaaccttttccaagggcaaagccggtcgaatgagccgtggcacaggtcgcaagtgccggcggaagctggctttccatccgaggttcaggtcgaggagcatggccactccgggcgtcttgatgctcctcatctcaatggtagtatcaccataagaagcgagcgagccagattcagtgacaacgacgagtttctctgtctcccaacctgcaagcgattcttcttgcgagtcctgcgtgtccatagcgtctggtcctccgatatcctcagcatcctcctgattgtgtatggatagccagacaagcgattgtcctttattattcttccatcgggatgaactgccgatacgaatgttccctggattgtcttcgaaagaaccgtccgacagccaggtcaaggcgccgtcataagccaagacgtaattgcgcaagctcggttgactgtgcgcgtgctcggggtcctccgtatagcgattgacctcgagccttaagtttgccgtgctcgcgaatttcttggcctcatcgtctccatcctgaagcagccatgccgatttgacgttcaggacaagctcccagtccgaccgactgcagacgcgtagcaaagggaatgttaattgtgaatgatgacgagcgtgatatgtaaacttaccaagctagtagatgcgcctcttcactatcccgcttcgatagaaacaggtcatgctcccacttgcatctcctgatgatggatttccggtctggagcagaggtcgcgatgttgcgttccaggaaagggtagcgagccggctttgagaccgccctccggaggacggtcggaaactgaactcaacaatgcgtcaacagcctgctggacggcgggaatgcagctcgagacactcactatcctctccgcgagaggatgagaccgatctcgagggtttctctttctacgcaagcccatccttgaaagagtcccgcctgatcacctcttgcacgaccgccgaggtgatttgttgacgaacagagcgaaatgaaacaagagatggttatgccagcatgacggtccccgaattatcaaccactaggttgatcagatgctctaggtcaatatctgacagccagcctgatcttgatgcaggaggagtgtgagttgcgaagctatgtgagtgaacaaagtaggtagccatgtgtgcatatggaggagcaataatcatcagcaagctagtatgataagttgttgtcgcgacctttttggcttcgcacttgaccgagtcctgcgccgagcgggcagaaattcctctgctcatactcagctctccatcagaaacatgtcccctctctcttgatctcacaactggctttcaacaaaggctcgcctaccaaggaatttgaaagcagctactcttatacgagatcgatcgagtatcgaagtccggcgcataattctcgcgaaagatgagcagatcatcggccgacaagcgagacatatattatcgattgtgtaggttcattctctttgttcacccttctcggatcgctacgacgctgatgaacatttgttttcgtcccaggtaagagtgaaggtacgtttctatccaaatgtatcagtcgcatctatggtattcaacgatgtctttacaaacaggctaccgagcaagatctgcgtacaagctcctgcatctcggtaggtacctgtcataggcttcctatggcccgacaactcgatctactagctgctgcgatcttttggtgctaacttctttcaaatgtgtttccagatgaagaattcgacctctttcgaggagtcaaagtcgcttgcgatttctgcgctgcgccagggtcatggagtcaggtcctgtcccgcaaactcaggtaagtgacggggggcgccgcaaaaaaaatcgattacgcaagctgagttcaatacgttggatcttataggcctgcaggaaagaaagacccggccaagatcgtctctatcgatctacaaccaatggtatgaacgaaagcataacccatttactcagtagctcgagctgatctcgatgccacttgacaggcgcctttagcgggagtgaccatcctacatgccgacattacggtaccttcaacgctaagcaagatgatggacgctatgggtgatgagaaagcggatctcgtcatctgtgacggtgcacctgaaggtaagatcaacggcacccgccctaagaagtcgctctgacctgtgaaactcgcctacgtagttaccggagtacatgatctggatgcgtatctgcatgctcaactactactggcagtacgtgctgtgatgggtcactcgctggtcctccttgctgacatacgttccgaatgcaggcattgacactggctctcccgcttcttgcgccaggagccaccttgatcttcaagatcttcctctcgccatcagatccgatgggcgagattctcatctcgcaacttgagccgttcttctctttccctcaggacggagacgaattgatagatgatacgctcgggaacccttatgatgagggaggctgtgaggtcaaaggttatgaccgatatggccgaagaggaggtgtatgggtcaggaagccgcgcagtagtcgagctgggagtgcaggtgagtgattggagcgtcggaattgagagacaagtcatgttggctgagctagcccctccaaaagaacacttcttggtgtgccggaatttcgatcccaactcgctaccgccgtcgttcgacttcaaaagcctatcgcacagcgtgcagtccttgtctctggattccttcagcgctggagaaaagaccaagaatgtggacgaagagagggaacggcgttggcaggtgatcaaaggatacacgatcggtgatttggattgtggacgttagcggcgccacgattgctggccagtcagcaactcgcaattcgctaggtgtcgagcccttggatgatcctgatcaagtaatcagagggcgaactttgtacaaagatcgaacgctagacagcataatataagcacactctagtatcaaacattgcgatagactcaattggttgggacactttaagacctttccgttattgctgcaaccgatttcgctcaagattcgtctccgaactggcaacccgagcagattggcgggcgcgatcacttcgctcctgaccttgctattcatcatctactatttctttacctggcccgatccaaaagttacaacgacgccaagggagacagcacagtttgcaacagagctagcagtcgctccacaacaagaaatgtctctcccagctgccgtttcatcggtcaaggtcgtcgaggccgtcggtaaacataccgggaccgtaatcttcctccatgtcagtaaagctggaccctataatcacgggtttcatccattcgctgacattgatacggtccttcgatggagtatagggtctaggagatcagggcacttcgtttgtcccgatggcacacatgctgggacgtcaattccccaacttgaagttcatcctgccttccgccaaaaatatccccatcaccatgaactctggctacaagatgcctgggtgagcacgtttctcagtccaccggatcgatataaagctgaagtttgaacccttgcgcacaaagatggtttgacatccctaccctagaaaaccttaccagcaactcgaagaggatggacgatgagcccggtctcatgaaatctgtcgcttccctcgagcagctcatcgctcatgaagtgaagaacgctcagatccctgaggagagcatcgtcatcggaggtttctcccagggaagcgtgatctcattattgaccgggatcactacgacgaagaaattgggaggtgtcgttgcccttagcggttgggtcccgctcaaccacaaaatcgccgaagtgagctcgcatgccggcccacctttgaaggacgtctggctgattgacgacgagattgtcgcagatcgcttcccctcacgcaaaggatctcgccgtcttttggggacacggtaccgatgaccaggtcgtcaagttttcctgtgagcatccgggccttgtcctcatcacttcagggatgaccagctgaagttcgctctgacagtcggcatgaaatctatcgagctcttgcagtcggttcctcagattaacctgccccttctgcctgctgaccagagctacgggaggcccggtctgacctttagaaagtacgaaggcatgccgcattcactggctgccgaggtgagtagtaatggtgcattcaagctttctacacacaaataaaactgacggctttgctggcctgaccattgcaggaaattgacgacctcagtgcctggctgcaaggcatcacttttgacgtctggaccgcgtctcaccgcaagggtctagccaacggagagtcctcgggaagcggatctaccatgggtcaccagacttttccgagtgctaaacaagtaatgtcttatcactctccgagtccattcctcacactgtttcctgccagctgaccttgcgatctccttctcttaatcaggaaccgcgtctctagaatgtcgaggggatactctacccgctcggcttctggttctggttcttcgtcttctggaaaaattccccgttccaactctgtccctgttccatctcccgtaacgactgtgtcttcgaattctgtacaacaatccgcaccgtcatctgtcacttccacttctgcatcctcgacttcaacacctcagccccaagctcctctgcaatcgaaacttcccgaccatgtgatgacgaccgctatcgctcctccgcgaacctttattgacaggcttcctaaagtactgctacccatcaaaccctacctcgaactcacccggattgataagcctattggtacctggctgctttactggccttgcggtatgttcaccaagcgtgtgttccttgactgcgtaccagcttcgaagctgatatcttccgtactcttcacagcctggtccatcacgctgtccaccttgaccatgactccgcttccgtcgcccttgctgccactttacaatctcgctctctttctgactggagccctcgtcatgcggggagccggctgcacgatcaacgacatgtgggacgcgcgcctggatcgagcggttgacagaaccaagaacaggccgttggctcgaggggccatcagcatgcgaggagcctcaatcttcctggttggacagcttcttgtcggtttggcggttttactgcaacttaattggtataggtaaatatacacgcggatcaccaaggtagctatttaataggtgctgaccataactcttggtatatgacagcatccttctcggtgcctcttcgcttggtctggtcttcatctaccctttcatgaagcgagtcacgtactaccctcagatcgtcttaggtctggctttcaactggggagctcttctgggttggtcggcggtggcgggagcggtcaactggccaatcgccggtccgctgtatctcggaggggttgcgtggtgtgtatactatgacacaatatatgcacaccaggtaagctagattcgcgactggggatccgctagcgcgtcctgataacattattcgctgtcacaggacaagaaggatgacatcctggtcaacatcaaatcgacggctttgcgatttgggtcagcaacaagaccaatcctggccggattgtctactttcttcgtgggcagcctgacctacgttggacaggtcatggcgctgggtccgatctactatgcggtttctgttgtgggcaccgccgtgcatcttggctggcagctgctcaaggtggacttcgggaagcgggagagttgttggaagttctttgttagtaatgggcgtctggggggattaatctggggtggaatgtggggcgagtacattgcgacatggctgggaatgtactgaagacattgtacatggcatcaattcaaccacggcgtgccttcacatcgctcttggcttgctcggtctcgtccgcttacacaatcaggccgctagtctcgatgcgctccctagaccgttcgaacaccgttttctgcgatcggatcctctcgtcttattgccaggccttcgaggcgaaagtcgtccgggcgcttatcgcccggaatgctcggggtctttccgttccctatcacagtcggtcccgtactttcttctacccgcgtgagaggtccagaacttttcgtcagatgaacaggatctaccaccggcattgcagatgaatggaagtcttcataggcatcttccgcaacgaccgggatctcaggagctgtctgggcgttccgatcgattgtagccagagaaccttcgaactggactgatttgcctcgatgcggaaccgaaatggaattcgtttcaacaacgtcgcctcctggtatgggttctagtccttcatctgatatgtctgatgcgggacgacttgaccctagcgtgaatagggaattcacaagcggcatcaacgaggtcatcattgacatcaaggtttccaacgtttcctgtatggactgcatgacagaagcgtcgacacagatgccgtgcgagactgatgaatcttctgtaggatcgggatctagtgaccttagatcttccattggtcgctttcgacgtagcttttggattagcttcggtggcgattgtgacccgggttcccgagtggggacacgaagtaccgcgggatcgggatcgggaccgtgacctgtgtccctgtgacctgcaaaatcgactactgcgggcgcaagtgtcccattttccatctgtgtgttctcgcctggggaaagttcaagggaaggggaagcggttcccgtgttcccagagttgtcgttcgcttgcggtatatcaggatccaacgagctgctaattcctagcagcggatcctcgagagcgctgaccatagacctagtgctagtgtcgctccggtcgtcgccaccatgagacattgaagctgataaattcgacgccagtttttccgaaccggtaggcttggtgtctgagtcaccggggatgaaatctgatgcgaccaacggattgtcggaattggttcccggtatcgaaaccgggtgcccatccaatacgggggcatcggaatcgacagtcaagttatcatcagtcaagagagaggagaagacattgtagacctctcttccaagctggaggaatttctcgtcagtccacgtgggaaggatcgacaggtcgggctgtgtcgacagataggacaagatactcgggacagaatctatcataacgcttgacttctcaggtctatccgcgtagcgatccagtgatcagtgatctgactgaattgcctgtgctttgaaaagcggggatcgctaagttgaagacactgatttgatatgtttttcgctgaaagttggcatttactacatctcgaggaagcattcgcgtctcgctatgcccgtgaataaacagaagagctttatatgtattgtctgaacctgccctctttaccctgtgagctggcgagaatgccatatggcgtaatgtttccgggctgtgtgagaaacaaaggaaacccctggatcacgttgaacatgacgctcatgataccctggtgtgtgagcacgatcagggcggagataggcgcaaactcgtactctttaccgctgtgcgcgagccattcgatcgctgaaacgcggaatcactcgtgcccatcgcacaagggacgagacccccggggctgactggtaccactcgttcacggattatcacacaatttgatcatccttcctttggctggagcatgatgacgactcgtgatgatggcacgttgacatccttgtcctataggctcatcatacaggccttggaatagactccgtgcatcggacagacggacgagatggcaggggcaatgtatcgaatgggtgagatcgctactcgaaaccttacatgcgtgaatgcgtgaaccggaaaatcatttaaaactctcaggtagctcgtagtccctgcgtacggggaaagcgtggtccgactcaaggggctctcctacctaaatctaaactcatccccttccccttccctcaattggtacgggttttcatcatgatatagtgggccgctatcagcaggacgtcgagtccatttgttctccaactttccgtacctggccatattgtatgtcaattacaacggagcttgggcaacttcatctgcggcgctgattggccaacctacactggagagatcggtcaagctggcctgtccgtaagaggagcctcctccacacgctgatggagcagaacttgatttgctatactgcgactcgtcacgaagtcatagtcggacggagactcgggacggtacaactgtgaccccaccccggaacggtagattctggtaatgtacttctacagaacattgattgcgcatcctgaaatggcttgcgtgaacgtaagaggagagccgcatttcatgtgttgtcttttgaaattagtcctgtcacatgttgcccttacctgctcctttgaacccctgggaggatctgtctcggtcagggccatcacagtcaggactagagcgatttgtgatcgcccaaacagaaactaagcagttggtgggtcatccgcttcccctttttacgccaacccagaccgttacatggcagggtaggacggtcatttcaggatgtgagtagaacagtcttcatgtttgtgggcaagactgcgttcatggagactcttgaaggaagaagaggccagtatggctgaagtcgccagatgccttgggcctgttgaccattgccgaataacaaccacatatgtgggcgatagctcagggcttcatcttttacctactgatttcgcattgacttatcagaagccctcgctctcagcgaatggaccggaatcctcggtctgaactgcagctctcaagttggagttttccctctcgtgatcgcagtaatagcgttattaggacatgttgttaggcgtctttacaagctggtcgtcataattgtcgtcatattgggcatctaggaagactttcggtctcgatgcatcgttgccagaaacacctctacttgccctttcccaaagccgcctggatcctcaggcaggtctcgaacagctgcaactcttcgtcagcaccggcacaaagcgcgtagtccgcttcagccatcgccatcgccgctagactctttgggatggcagagatgaaagcgctggggatgatggcatcgtggagctgaggggcggacgtttttgtatcgtcgagttagagacttgttggaagctcgaaccgttgccaaaggactcacctgctgaagcacctgacctgcgctgtaaccctgacgtccgatctttttcaccgtcgtatgcacattcgtgtatccctttcctcccttgttgccgacaacgtcgagatcgatcatgccggattcagggtcgataccgatggcggctagaagcgagttgatgacgctgttgggtaccactccagcgatctcgtggactgtaaaccgaatggtcggatcaacacgctttcgacgacagagaccttgactcgaagcagactgactagaatccgcagtgatcgatgttggtgggctttgagctccgtgtaatcgctgcccggtctgcatgtacgtgattgcttttctcaagtctcctccagccaattccaggatcaacgggatgacctggcgtgttcccacaacggctgttaggcaaacatgatctttcgcccatcaaagcgggacatgctcaccccctcgtcgatcttgacgttttccgcttcggcgatcatctcgacccgctgcatcgtgctcgtcgagtcgagtggcttgaaccggaacttggagcaacgtgaagcgagaggttcgatgatcctattcgttgtcatcgtccacgtcatgagtcctcgagtcctctccatccttccccggctctgctcacctggtcacatagttgcagacgagacaaaatcgagtgatcttcgagtacgtctccatgatcctcctcaacgcgctctgggcgtcctgggtcatcgagtcggcttcgtccaggatgatcaacttgaacgggggttgagggtagaccttgccatcgctagagacatcgacgcacaagcagattcagctacggtgcggtcgacgtcggaagggatgaaggccgaagcggggactgacgatgctgcaccggaaacgtgtctcggcgtctccctggcaaacgtcttgatcttttccctgacgaccgagatacctcgctcgtccgaggcgttgagttccaagacacgcgctcggaacaggtccggtctgatatgacagccgcggccagtcgttcagcttgctgcgtagcacgacgtcgaagagaatacgaccacgcacccaaacatctgtcgagccagagccaagatcgtactcgtcttccccgttcccggtggtccatagaacaacatgtgcggcaactgggcacacatcaacacatcacgttcagcttgttgatcatatccattgggggtccgggggggggggtcatgaacatacgttggtgctattcagcgtcttctttaggacggccacggtatgctcttgcgaactgatatcctcgatcgtctttggccggtacttttccacccacgctaacgacggttcatggtacccggcgcattccgtcagtatcccgacctcttcctatcgatcatagtggatgggaccgctcacgttgtttagcaggatcggccagatgaccggtctgcttgacgttttgacccattcggaacgggttggacgccccgggtaatgtgctctgaccggctaccatcgtcgatgattcaaagctagtgtaagtggtactacaatacaggtcgagaggctagtctgggcgggcgacaaactagatcggaccataagctgaataaagtaggtgcatgactctgatcgacgtcaaccccatccgtctaacccgcatgatccgctctgcgacgcgcttctcgcgcgatcgagatcccatttacgaaaaggatgggggacgcgtcgtgggtgaattatacaggcagtcaaacagtcacggccatccattccacacctcaggatcgccaacccagaccaagaccaagaccgatgagcagaaaacatgagaaagaatcgtgctcgagaccaatctcatccataatccagacccctttctcataagagaatcgacagcatgaacgagccaacaacgaaaaacaaaacgtcgtcttcgccttccgccgcaccatcgactttatcttttgaggaaaagagtgccggatcttgtcttgaaatccgaggaggacggaccggtcccgttccctctcgaccttgtggagcggacctgggacgggttctaaaggttcgtacgatgatggagagagaaagagtcgatcgtcgcaggtccaggtcgagagtatttggtttggtttggtgtgaattgatgtgggtggtggaggtgtaggggaggcgacaggggtggtgggggggaagagacagaatccagagacacaaacaaccgaaccgcgcgggccgagttgtttacttcttggaagccttggcaccgacgtcctcgacggcgagacctgcaggggacagaccgaggtaaatcatcagccaaccgtgcccacctcgtcctactccccccatttcctccaaaagtcgaggccgaggtgatggggggaaacactggttcagacgctgtacttaccagggggcaagctctgcctcagcttctcagccttttcaccatcctcgaggaccaaggtgtacaagtatcgggaacacctgatcttgaacttggtgacctgcttgccctgggcagcggcggccttggcctttttggagaggacggcgttggggccgacaggggtggggtggaggagggtcttcttgaccttggccgctgcatggtgggagagacgacgccaatgaggggagggaggttagttgagtgccggacgggtgactagaggggtaaacaggtccgaggagccatcgaggacagtggcgtccgcggacaagctcgctctcgatcgacctgataagagtgcggagtgggatggtactcacacctcgcgtcctttctcctggcgatctccaagaacttcttgatgtcggtgatttgcttgggctatcgtatcaacgccgtcgagcgtggcagcaggaagtccagacgagagtcacagaggatgcgccagggacgtgtccgtgtttgtcgatcgaggggacatatccaggaagatatcggtcgatttcagagtttcgtcgttgtccagcgatttcgtccatccaatgaaaaaaagcatcgtccacaccgggtccatcatcatccatccaccaaaatcgtatccaccagagtcgcattcaagagtcgtccgaatgagcaagaaggagagaaaagagaggcacatgtaacaagatcagcatcgaaaacggatccccctgttacgatcgaccgccgccgccgccgccgtcgtcgtcgtctcgtcgtttccatcgaaatcggtgacgcaccatttttgaagattcttttccttgatcgagatgttaccttggagagaaaagagggaagagggtcgagggtaggtggatgttgatcacgaggtgtttctttgacgaggtggtttgaattgcctagggctagggctggggaggtgagacggggggtgacggcagggaagcagaggagagtgtctcgctgaggccctctggatggttggtagggaatctgggccaggtctggctggaagggctgagaggctgcagctgctgctgctgctgacctactactgagaggcggcagcgaggcccagacactgactgactgactgaccagagctgccaacctcacgcgcgcgagagagagagagagagtgagccaggcaagccgcccgcccacccaactcagccaaaaccagtcaatacccctgttagaagcgcgcgaaatggtcgcgcttgatcgcctatcgacccggggatcacgcagagtttagattttctgtatccgcacgcgtcgtaggaaaaactatcaacctcggcgttaaggcagagactcgtcgttgaccctgtcccccttggctcgcccgcaccacactcactctctctctctctcgcttgtcgccccccccctccccctttgccattcgaacctcactctgaccttgtatgatcacattacacaacccatccatcaacctcgaatctctaccatcgtgttcaaccttctgctttcccaccgaatccagttcgatcaccacccaccaaaaagactttctaggaagaacactcgactcccttcacaatggtacgttgacacgatatggacgtcgacgaccccagcgcccggtcccgcatgaccacctactaggcaagaacgcaaggaaaccctcggggacggatcgatccttttcttctgcgacgaaggttttttcctctaccgtgcacgtctgcctatttacctcttcaagaaaagtctcgggacagagacgaacgaccacccgactctggatcttcttgaaacgatgaggtcaccgtcgccctccagatcgtcttcctcgccatggccatgacggtattcaacaccggaccaccgaccccgactttcccgatacaatcctcccgatcaaccgtcctctcgacatcttttggttggttcttgcaacgggaacgcgctcttggtcgatcgaaacaaagggaggacgggagaggtcctcttcattcttcttttttcccgctagggctcctactcgaatgaggggaaaaatggaaaaactctgagagaaagctttttctggagaagacggttttttgtttccccagacgtgtccgacgttgtccagagggggaagggtttctttggatttcttttttgaaggggtttgatttcttcttcgcttcgagggtttcagttcgaggttgggtggatgatcatggagtgaaaggtgggaaggatgtggttgagggttgggatggaacgatcggaaggggtcaacttggggatgggaatggaatgacgcaggctggagaggttacccagggaatcagagacgttgatggacgctttgaagaagggagggaaacgaacagaacaggacgtcgcgcagattttttccggccactcccgctagtccgacccgacctatctttggtcgaaaagaccaaggtgtgggacggggggcggatatagcggtcaagcgaggaatcggcgtgaccaagagtcggacaaggacgatgggacgtatgtcgagagcacgctacggggtgattcccgctcccctctgctttgacgcatccgtccccctgtcaatctcacctctaaggttctttcccgaggatattctcaccgcggatcgacgtctctttttgcagcttgcctctcctccttttcgtcttccgctaccctttcccttccgatcgcctttcggaactccctcgccctactttccctgtcattcgacacacccctcattcctgcatcatcgcgcccaaatcgatcgaaacccaaagacgagcgatcgaaagtcgaaactcggaaagatgaaaaaaaagcaatcgaaacaaacactttcaccctttggggacgggatacggggacaagacctgatccgaaaatggccgagtcgtctttcgaacccctcgggcccggttcgtcctcaccttacctcaccgggggcgagctggaccgagtcagtagaagacggtctcttagagcttccaaccctttgtgggggaacccgggaaaagaagaagaagagacctctctcacctcctcgatcaggaccgttccccgttcagaacacacgaaaagccagtcggtgggggaaaacggacggtcgagaggcgtgaaagtcgtcgtttgtggtcgggaatcgtcaggctatggcgtggggggaacgaactggacggacgacggccctacttttcaagggggatcccgagtcgcgttcgacctcgcgtcttgacttttcttgagagagagatagagacggatgctgcacgataggggaggacgtcttctcgttggaaaggatcgattcgtctcgggtttcctcgcgctcgtggatgcacctctcggggtcatttgcgggtgtgggaccggggcgtgtcgtctgaccgacagaatgatttctccaagggttgagcaagacggaaggctgatctcgataatcggtcctcttgcttcttgcttttccccctcttcgccatcattgacgctcttctcttgcattcacactcgactcacgactttgcttcttattcctgctcaatgatctgcgccatacccttgttcccccttttcttccttctgctcttctgcgtcggtctgggtctcgggtttgtcttttcttgtcttttttttttttttccctttcgaaatagcccaaagccgctaaaggaaagaaggtcgcccccgccccttgtaagtcttgccacagcgcgcaatctcaccgcaaccgcccccggtcctgacccgattcactctccctttgcagacaccgccggaggtgccaagtccaagaagaccacccagaaccctctcttcgagaagaagtcgaggtcgttcggtatcggtggagacttgccccccaaggccgacttgacccgattcgtcaagtggcccgagtacgtcaggctccagaggcagaaggttatcctcaaccagaggctcaaggtgagagcaggccctggaacgccgtgcgattgcgttgcaagtggctgacgatctgcgcgactcgcccgtcccattaggtcccccctgcgatcgcccagttcggcaacaccttggacaagaacaccgctacccagctcttccagctcttgaacaagtacaagcccgagtccaagcaggagaagaaggcccgtctcctcaaggaggccgagtccaagaccgccgagggtgaaaagtccaccaccaaggactcgaagaagcccttgttcgccaagtacgggttgaaccactgtgtcgccctcatcgaggccaagaaggcttctttggtcgtcattgccgacgacgtcgaccctatcgagttggtcgtcttcttgcccgctctctgcaggaaggtgagtcggcatgatagtcgagggtcccgagtcgggctgaccacgtctccacgtacgtcgcggtagatgggtgtcccttacgtcatcgtcaagaacaaggcccgtctcggaacagtcgtccacaagaagactgccgccgtcgtcaccttgcaggacgtccgatccgaggacaaccaggctctctccaccctcgtccaggccgccaaggccaactttggtgacaagtacgaggacgccaggaggcactggggtggtggtatccgaggaaacaagtcgtacgtccagtctcaaggcgcgcgcgcgcgcgagccagtcaggcaggcaggcaggtcgttcatgtactgacgtcgttcccctcccctatatagcatcgccaagctcaggaagcgagccaaggccgctggtgtctcccagagcaccgtctccaccaccctctaaacggtcggtgggaccgggttggctggctagtcgtgtaccttttttttttctttttggattttattttcaaagagggatcattacaaaagagagagacgatacgcgagcaaacgcagcgacgtacgacgagtttgtgggaagtgggggggcgtcgtttgtttcatgggggacgatctgttttcgtcctgtagtcgcacggtagtttccctgtctacgttacggagatcagtcgttctacttgtgtccttccgcctttgctcttttcaatacattgcgtctcacccctttgcgagcgagggtccctgtctaaaacgagttgcgagaccttgcccgtgaattccctctgcctcgccctacttcgaccacgccacgctcgatgccgtcatcaggcttgattccatgtgaagcgcgcgcttgaattgagcctgacattgaacatttacgttgtcgtcattctctcgtcactctccccttccctgcccagccccccccccccctccctccccccgccctttacctgcgagattgatggattgaaacgaaacgaatcttgctttcataaacacacatttcatcacatcatcatcatcatcacatcccccatcacctaaactttacctctttccaaaaaagacattctcgatcctcgaatcctctccatccttcttcaactactctcccagtctcaattcttttgccaatctctcgagaccgctagtcgaacaagacaaagacggacctttagccggatcaacagggaaatctcaccgcaggacaaatccacgaacgtgagtttctttgaacgaatgatatcccgccgaaaatggtggacgaaaaaggaggccaggtcgcaccctaatttcggggatcatctaccggtgactggtccggtgatagcgggcagagtgaatagacgggataacccatgcggaatggggtgaacccatcgtcgtcaatcgcacgttaccgggatcctcattcgtacagacggataccctcctcggacctcttgcgtgccaaagggcccttcagaagaactcacctgactgactctttcttacgtctccctctaccatcctgttcacgtctgcctcgaacatgcacacagcgtcccgccagtctttcctttcgagtataaagctcgactacacttccccccccctaagtccccagctaccaatctcgcccagagcgatttttacctctctttcatcatggacaacatggttcccgacccttccccacccaactctttgtcgatcgacgagatccaggctcaaatcgaccacctcgagcagagccacaaggaaaagggattccccctctctggacgaatcatccatttgtgtcatcaccttcccgtcgagatcacccgggtcttgcccgctccttccgcccctgcttcgggagccaacacgcctagcaatgagcaggacgggtacatgtctccctccatccggaacacttccaactttgccggtggagtcctccctcctcagcgtatggaggagttcaaggaacctcacagtaccactgttgaagattccaactggaagctcgcgagccgtcggggacataccgccatgatctcgggcatgaggtctttgagcacgacgcacgaacagatcgtcgtcgcttggaccggtgacgtcttgcaggaatacgccaaggattccaagaggaccgtaccctcgaccccggttcgacccacccctaagcggttacaatccatcgcagggaccgcacctggacgggacactcccgctcagcccgacatgtctatcggtacctcgatcgctagcaccccgctcgcccaacccgaggtcgaggaagaacgtcccgtccgcatggacgaacagccttcggtgtacatggccgaattgaccgaggaggagcaaaagggtttggagcgtgagctgcacaagtttagcgatcacgaggtcaagaacgataacgctgggaggatgacctatgcgcccgtgtttgtaccccggggtaccgccaagggacattacgagggttactgcaagaccagtaagtgggacgacggctgatcaagcttcgtgaaccggggaagattcgtcgactgatcggtcaccccgctgcgtcgtcgtttctagctctctggcccttgttccactacttgctctggcaagactcgcccgtctccttgcccgctcccgacccaacgtggcaggcgtaccaggagaccaaccttctgttcgccaagcgtgtcgccgaactgtacaagcccggcgatttgatcgtcgtccacgactaccatctcttgctcgtccccaaaatgatcagggaatgcctgcaccaggtctccccttacgtccctcctcacgacaagccggtcgagcagcccgtcgtccccgagggcagccaggccaggcctatggccgaggatggaagacccgtcgtcacggccgagggcaaacctacgagcccgatgactctgggcaacctcggtggagagaccagggagcagggagagttggccatcggaatgttcatccacaccccttggcccagttcagagatctttaggtgtctgcctagtgagtccatcgagcttgcctctgcctctacaatgataggtcgtgtatactgaccacgatggtatcgctcgatgcacagagcgcaaagagatcctcgagggtatgctcggtgccaacctggtctgcttccagacctattcgtactcgcgacactttgcctcgacctgtatccgtgtttgcgggtacgagtcgacgcccggcgggatcgatgctaacggtcaggttacggccattacctactgtcccatcgggatcgatgtcagcagggttacctcggaccggtgagtctcatcgggctgttggaaatccaagtcgagcggcacgaagaactgatatcccttgctcgcggttacgtgtgatagtgatcgatcgggagtcgacccgaagacgatggctctccgttcgctctacaagggcaaaaagatcattgtcggccgagaaaagctcgacgtcgccaagggtgtctacaacaaacttcaggctttcgaaaagttcctgcaggtctacccggaatggaggggcaaggtcgtcctcatccaggtcaccacccctgccttgtccgagcagcccaacctcgagaccaaggtcgccgagctcgtcagccacatcaacggtgcttacggtactcttgactacgctcccgttcatcactagtaagtcgctggatgcatccttacgatgagaatgaacagacactaagactgctcgttgtcattttcccgtagccaccaagctatcgaccgagacgaatactttggtttgctctcggctgccgatttggccctcatcacttcgcttcgtgacggtatgaacaccacgtcgatggagtttatcctctgtcaggacaagtcgaacaagtcgcctctcgtcctgtccgaattcatgggtaccgcttcgtcctttacctcggccctgcagatcaacccgcacgacttgctcggtgtcgcccacgcgatcaacaagggtttgaacatgtccgacggagaaaaggaagagaggcacacgagcatgatggacagcgtcaagagccacaccagtcaccactgggcccgaacgctcctgaagcaggtcctcgaaaacgttggttccgagcaccaggctcatcagacccctgccctcgacaagggcgctcttcgaaccgcttaccaaaaagcttccaagcgattgatgctgttcgactacgacgtgagcacagacagattggctgctctttccgcacggactaattgaatgtccatcttccatacatacagggcacactcaccccgatcgtcaaggttccctcgcaagctatccctaccgagcgaacccgggcagcgatcaggaacctgtgtgaggatcccaagaatgtcgtctggctcatttcgggacgagacggcgctttcttggaggaacactggggtatggtacctcacctcggtctttccgcggaacacggctcttttatcaagatgcccggcagtgacgaatgggtcaacatgactgaggctctcgacatgagctggatgtccgaagtcgaggagatcttcaaatactacaccgagaggacgaccgggtcgacgattgagatgaaaaaggcttctgtcacctggcactatcgtcaggccgacccagtctttggagaattccagagcaagcagtgtctcgacctgctcgagtcgagcgttgcacctcgtcgacctattgaaggtgagatttcgagttggcttgtttttccagttcgctccgctgacccgccttctggcacgtcgaagtcatggtcggcaagaagaacatcgagtgccgtgtcctggccatcaacaagggagagatcgtcaagcgaatcatctaccagaacccagatgccgacttcctgttctgtgtcggggacgacaaggtgagcttggtttcgccctctgcactgctccatttctgcgtgctaagcgagctggatcttgatgactagaccgacgaggatatgcacaaggctgcgcgaagcgttctgcctcccggtggccggtatgctgacggcaaggccgttacaatgaaggcaccggtcgccgtgaccgcttgtcttgacgaggacgaggccgacaagttgcccgaggtcgagctcaagatcgacggcagcggcgtcttctcggtcagcgttggacccagcaccaagaggactttggccagtgcccacttgacgagccctgaagaggtcatctttgccatggagggcgtgctataaacggcgttcccaggttcccttctgttcttccaccgaaacgaatatatagagtaataggttcacaggaaccccggaattcagttatgcgagtcttgccacagtgtacaaaaagcgacttcatgcatatacgaaacgatgtctcgacacaatctcactgacgcgtagtcggcccatcagccttgtatgacacatgagcttctcttttaataatcagctagtcgacacaacaaggccaccgactggggttacacggggtgggtacccgcgttgaaagcttgcacactcttctgtgcgatcttcgataggggcaacgcatccgtgtggatgcgatcgaagcattgctatcatatacgtttcacgaatccagaaaggaacaaatacaatatcatagaggggcggatacaaactacgtctaggcgaaaaatttgacaatgacacgggccatgatctcgagcgcttgcttgatctcgtcgtggggcgcaaaggagaaggccaatcgcaaaaagccaatagtctcggctccctgatggggtcgtccaggctgagcgtcaaagaagaatccaggtacaaccaggacctgcatagaagaaagtcgcatttgttagctcaaacgaatggcagacccgacgcttgttccagaggctagacccaccttgttctcggctagctcgatgaatagcttttccagcaacactcgagtcggatcttcaccttgcgatcgcaacttgttgaagtccttgtggctatcgagatgcacagcgagccagacaaacattccggcgctgggcgggacgaacgagacgagcggcttttgcgccttgtaacctcgtttctcatccatgacggtgcctcccataccaggcgccgtcttttcataagctgtgatccacttgatgtgttgcgagactgctaggctctggtcaaactcgagatggaacgtcgactcgagcaggtcacactgaaagaggtgaacgaactcgtcagctccgaacactttcgtaactgatcgaggagtgacgtaccatccagtctcgtcgcatagcataagtggccttaattccgcggagccatcggatgtaaccgtcgtaaccccactcgagcatgagcttggtgatcatggcctgaccgatcccgttggggctagagatggccgattcacaccctcgcaggaggcgttcggtgctgcgggattgcgagcgccagtcagaaactttaatgagtagcgctgaccacgttcgaactcagccgactcacaagagcgggttcgcggtgaaccatcccaacctggatccaggagcgatcgtctttgagaacgtgtccaacctgatcactcggccctggtaatcaaagcgcaagtaactaggcggcaactttttgaaaaactcgtccacgcccttcttgtcgtccttgacatcgtcgtaagcacggagcgcttgacccgattgtttacccgctcgaggaacccaagggtcagagtagaggaaatagtagggctcgtcctcgacaatgatgacgtctgtggggacagcttgacatgaggaatccgtatcgacctaacgtccccttacggccggacacatcgacgtaccgtatttgacgcagaggtcgtaaatcttctgcttcctggccgcgagcatggtcccaccggtcgggttctgcccggtaggcacagtgtacaagactcgaggtcgccttcgaccttccttttgctcgtcccagttggcgaggatcctgtcaaagtcttccggaaggagaccttcgccgtcaatcttgacactgcgatgacgtgagacgaaatatgtcaaccgcaagattccgagtcgagttggtcgtgcagcaaagacaaaaaaagcgcttacgagacggccttgatgtcgagcggctggtaagcgttcatcgctccggggtaggtaaactcttccaccaagatggcatccccacgttccatcaacatgttgacgacctggttccacccggccgtagcaccgacgttgagctggatctgccagtccgagaacccgggttgatagaccttggccacgaagttgcggatgaattcacggagagcaggatgaccctccgccgacgagtactggagcagcgtgctcagatcgacagccgatgggtcgatgacgggttcgtggctcttggggatggagatggtcttggtgggctttttgccaaagagccagttaacccatgattgttccttgacggtatctttggagacgttgccagtcagggtaggaggctttttggcgagcgcatcgtaaggataaatctcggccgacatgctctcaaactaaggtcctcaattgaaaaaacgatgagaatcattctgccgtatacgatcgacgtgcagattctgcctattacgtacgggaaagatgttcgggttgggcaggccaccggcgagagacaacatgcctggttggcccatgtacttgtacagtcccttgagcgagttggctgtcctcgacctggtcaaaagattgagatgatggctcaggtcgatggattccggaagattgttcttcctggccgaaccagagtcggcgaatgcgtatgaggcgtccatcgttgaccgttcgttggttgcggaagtcttgggtttgtgatggagcaagacttgtgagtgatcttccagtcgagtgagtgggactcgctatgaggtcacgattatatagtcttcccagtcggatcgaggttgctgatgttatgtgttcagcgacgagacgatgatggtttccgatattgataacccatcgagcccgatcgagatagcaagcagggcaagccaggggatattcttgctttcgccgcgatttgtcatcttggccgaaatcggatctgcccgaaaaagggcaaaaagtggaccacaccaaccacaccacaccacacatgtcattcttccgagaatcaacagaaaaggagattcgacgtggcatcatcattgtgtatctcttgaacaaggacgagcgaaaacgaaatggatcggttacaaatctacatgttgttccaaacgttcctagaaatgcatgtattcctggtgataacgatccctgcatcaagcgatcgaaaacctcttcgggatcctgacccgcgtactccgccgtacagactctccatccccctcaggaccgtcctcgaccgcaaccgtcgctcggttgtcgctgtcaagatcggtcgacggtcgaaggtcgaccttgagacgttgcacggcgcctgttcggatgggtttcgttggcagtcttacctcctctgccgcttcacggtcggacaagggcggtggggagagcgatccctcgactaatcgattccaaaccagtgtaggttcgccaatacaggttggaatttccgcctgggcggatttcgccttgttgtctgccttgaagacctcccctgttgccgcactaccgggcttgctagcagtgaagggcaaagcggggttcttcctcgtcgtcgattttcttttcggcttgaccgtagtcacctcgataggggagtcgccgttgacaacgggcgcgatctccttctttgccttgctcggccgtttcttggtagacggcttgggcagattctgggcaagactgacgctttcgacggggacctctggctcggcggtcgtatccgccttggcttttttcgactttctaggtttcttctgcgatacttcgatcgcacccgtctcggtctgctcgacgagcggcaaaggagcttcgaccgggacctctttgtccgtgatcgctccagactcttcttcgattttctccggaccgggatgtgaacaagccgactcgcgacgatcgatgcccaactcggtcccttctgacttggagacggtggcgagctgactgaaatacgtcggtcgttcccagccgtacgattgcgcttccatccatcgttcggctttcgatcggttgctcaggttgatcttcttcttcctgttcgaagaaccctctgcttgcaacccgagatccacgtctgacgatgattccggtcgaggtgaattgaaagctccactcaacttggctttcgccaaccggttacgctcacgcgctccctttttccacatccactccatcgtcccttcgacttctgtcggtgtgggaccgtgggtaacccacgagtgcatgaaatcctgcaaatctccctgtacccagacgtcaaacgtgtcctcccacgccttggccggcgcatccctgttgagcaggatcgtccggatgggaaagttgtcgacattgaacggttcgtcatcctcgtcctcggtctcggtctcggtctcttcaccgccgctggcttcgggaggcaagagcccctcgtctcgcatctttcgcttgcgtttgcggttggccgctcgttgtcgattacgggctcgggtcttttcgtccggatagttcatcctcaaggcgttggaaagctgtttgacgattttgatgacacccgggatcttgagcgttgtaccggcgacgatcaagagatcgggtcgatcgtcctttcgaacgcccaatacgtccttttcgacaatctctccgatggccgtatcgtgtttgcatggttcgttgtagagcaagacgctggcgcggagaacaccgacggatctggcccgctggttggcggcgagtcgttcttcctgtgtctcttcgcaagacgggcaggacagcagatccgcgggcaaggggtaatattcctcgaaattctgactgtacgaacatcgggtacagtccatcgtcgacaagacgccgtgaagcggtaccgcgcggggcaagacgttggctcgaatcgaggcgtccggcaagggttccatcttggtgggtgtacgcaggaagccatactgcgccgaaaggtccgtccgaaccgaggatactgaccgagaagaggcgggagtatccggtgtgttctcctctccagcggcagtagaggcgtattgaggcgtatcggaccggctgcgttgatcgcattccaacaacgtcctctcggcctcgctgacgctatccccgccttcgtccgtggtggagagtcgcgaaggtgtgctctgccggctcgacccgggttcacaaggctgatcgagtccgaaatcggtgggcctgacttccttcacaagccgaggaggcggttgcgcgataggctcctttgactctactaccgccgtcactattgtagtttcttgaccgagctgtaactccctgcgactacgttccctcttccatctccgctcgatcctcatcccctcgaccacatccccgggggccctgaggtccaacccgaccttggcttcgagcccgtcaatgttctgcgtatagacgcgcaacaacctcccctcgtcgtccaacgtcttcatgtacttgtggaacacggtcggctgtgtactctgggtgaggcgatgcagggtgttgagcagggaatgatgtgcgggcaagagggaaggatcagagagacatcgaacgtcaaagagatccttgccgctccggatcccaccgacgcctccgacggtcatccgtcgagtcgaggtggcgttgctggtcgacgaggtaggatcacgagcggtatctccgtctgaacccgagccggacgccgcttccctctcttcctcctcttcgaccgctccgtcctgttgtccagaagcagccagattgaaactcctcgtcctgcgaaaagactcgcccatcccgctctttctccgtttccctagccctaactccaaatctgagcgtgcgctcgacccggacgcttgacctccttcggtggcctgtcccatggccgacggactcgcaccgaggttggagtatgggtccttggctagtgtcttgaataacccagtggacgatctgaaatccgggatggccggtgtcgagatccccgcccctatcgaattcgtcgaccgcagtcatgatcgtcagctttttctttctttcaacgccatgcgagggtgttctcgaccggaagatattgaaaaagccgactaaccacagacgacgatgactcgacgagctcgcctgacagcctgagcggtcctagctagtccataacgaacatcgtccggaacttggccgaacccgcgataatgatgaatcccagggcccgaacctgaacccgaacccgaggccagcttgtcatcctggtcatcacgagtctggacgggtacggccgatgatgacgacaaagatggtggcgatgatcccgggagatcctcaaacgttttggcgcgtccacccaatttccgcttcaagttgggtaacaacaagtctttccccgtgtcccccggcagtggcgccgtcgacgcctggccagaaacaccgggtgggagggtcctgtgcacgggtgtggatagagtcttcctaaacgcccggggtgcaaacctctctactgccgggattgcacgggtcgggcctgtcggatcgatcgtggcgggtgcgggaacggtcgcgctgtgggtatgactagagggggtctgtccggggatggggtgttgtggatgaggatcaggaagggggagcgtgatcgtcatcccgcctgtggaagctccagagaattactcggatggtatctttggtaggagaggtggtgctgatggtgatggtgtcgcctggagaagtcccctatcgcgtctgggctataggggtaggtaggtgtgatgaatatccgtcgcgtctagacaggggtcaatctttactcgatcgagctcgggctatgcatcaggagtcgcctgtcgagcttccgtcgagtggcagtgctagacaaggagtgtgatctgatgtattgaaggtggtgcaattggctaattgggacgatgtatgatcgcgatccgggcgaacgcgtaggtaggtccttgatgtgcgtcaggggtcgtaggcgatccgaggcgatcgcgcgtttggctgggtttcgattcaggctgaacggtatcgactggcgggaatagtgatggaccgggttgatggtgactgcctatgtcatggggattcgatggagtatgtgatgattcgaggttcgtgtaaggaagcgaggtgttgcgtacctttgtttgtgttagagtggatatcccaacaacatgcatgacatgcaactcgcaactcgcaactcatttttgacctcggactcttggtgaatcatcttcaatcattttcatcagatcggtccttttattgggtttggcatattcgaacacgtacaacgaccttgagtgacaccccaccccaccatcccattacagtttgcccctcgcaacttccaacactgtcaaggtacttgctacctacgtggttgaactacttgaacatgttgcacgagaagggtaaacctacttgctacttgctacttgctacttgtttgcgtatgtgtacggatgaagtgatgccgtaaatccctcacctccccccttcaattgtccgcgcatcacgtgacttgtcatcagaaactcggagagcgaagggggggcaacctctcaaataagttggctacaactacaatctaagcaaccacagttgttcgactattcacctaaaccatacaacccgcaagcacaacaccaaacttcgaagtcaatcccagttaatacgcctctacataccaaacactcgcttgttcttacgatatccgtcatgccgaaagccacctctgcgaccaaggggaagaaacctcgacacacgcctctgcacgtcgaaatctccaaagactcggacatgcaaaaattcggtcgagtggccgctcctgccagtgaaaagggaaaaaaacgggcgggtcatccatcggcggccgtcgtcgatgatgacgtcgaggaggataaggacggtggggtcgtcggaggaaggatgtcgagaaagatcttggacctggcgagggatcaacaggaagaagtgatgggtgagatggaggacggggtggacgaggacgacgattgggaagaggatgacgaggtggatgaaaaggtcgctggaaccggtcagaggatcaagaggcctgatgccgacgaggaagaggaggatctggacgaaggggacgttagcgacgaggagtacgccgagctggtaagtcccgcagatgaatgtcgtaacatgagagatcgagaacacgttccgaccgtgatcgctttttttccgtcataggaaatcgatcccgaggattacgagaccctcgctacgctccgacggggcgggatcccagacttcaacgacccgagcaacgccaacaacaacaacacgaccgacctcctctcctcccttcccaacgaggacgaaccgcgaacgctggccgatctgatctttagcaagttaaacgaagccggtcattcgaccggtggggcggggagcgtaccgggtgtccgagccgtgccaaaccagccgggcatggatgctgggatggatggaccgttggacccgagggtcggattgaaccccaaggtcgtcgaagtgtacaccaagtgagtcccgccggttatcctgctcgactagacaccgcggacgtccttgccgacattccactcgcacgtcctcacagggtcggcgtcctgctctcgcgatacaagtctggacctctccctcgagcgttgaaaattctcccttccctgccacactgggcccaacttctcgccctcacccaaccccccgcatggacccctcacgcgacgtacgcgtgcaccaagatctttgtatccaacttgaaacccaccgaggtgcaggtctttctcgaagggatcttgttggaaaaggtcagggataacatgatggacggcgagagcaggaagggcggcaagggaggcaagttggatgttcagctttatgaagcgttgaaaaaggggctttacaagcccgccgcttggttcaaggggatcttgttcccgttgtgcgaggtgagtcggggctggatcgacctcgacgacacgatctttgggtacacgagtctgactggacgatctcgtctgcattctcgatcaacagggcgggtgtaccttgcgggaagccaccatcatcgcctcggtgctcaccaagatctccatccccgttctccactctgccgccgccctcctgcggttgtcaaacatggaatacaccggacccaactcgctctttatccgggtcctgctcgataaaaagtacgccctgcctttcaaggttgtcgacgccctcgtgttccatttcatccggctcgcgaatacggggatgaagggagtcagggggatcagcaaggaggaggaagacaagttgcccgtcctatggcatcagagcttgttggtctttgtgcaaaggcgagtcgcgtagtaaccccccggatggggtataaagtctctgacagatacgaaccgaacgctgactcggcgaccttttgttattcgccggacacaggtacggagccgacttgacccctgatcaaaaggacgccctgttggacgtcattcgagcacgacctcacccgcagatctctcccgagatcaggagggaaatcttgacgagcgtcatgcgtggggaacctcgaccggaggagggtgagggggacgtagagatgcgatgagatttcggaggggggcggacgtcgacgtccggtgaacgtgtagagaagtacgagatgtttggttggggattgttgtatatcatagaatggcccgagcatcgtcatactttccgaacaccctcgaccttgagctaaacaccggatcgaggccaaccattcgaggtcagccgatgcttactccgttcatcacacgttttacgaggtcactcgaacagcgagaccacccgtgcgttccgctatgcaggatgtcaggagggggaaggtcgacgcggacatcaagcaacactgggttgaacgacaaggctaccccgtgcgtcatgacttctggcggcatcgggattccgggtgaatgtatagagaacgtgagttggaaatgtgagtcggaaatcgaatcggaaagggcgagatccaaggtgttggagtcgtgcccattttgacaggagacatgcatagcgattgctagtgatggttctagagatgaggcgtcaaactttcccatccgatcttgatgttgccgcgcaagggcctcaagcctaggtcggaagcgccgggtctcagtccggtagaagccaggaatcgggtcgtagaacgacatgttcgacgaaccatctgtacatgaacatcccatctatgaaccacgtcggaacgactctacgggctcgcctcccaccatcgtctacgatccccaactcgccggtcccccgcatcacgcctagctcgtatccatcgattccgccccggccccaaacttcttggccctcgcgatcctcttcaactcgtcatcgagctcttgctgagtcttttcctttggctttggctgcgtcttgggtggttgttgtttctgctgttgttgaggcgtaccagtcgacggcccggatttccgttgtgcggatgatttggcgttctggttctgatgctgtttctgggtttgaaggtaattggcggcttttgcggcaaacttggggttggtctgaagtcgatgagagaggttctgaccggcgctggatgccgaagccgcggctttgcgcgctttctgagcttggatcaggctgtacgagctcgagcgtctgtcaggacgaggaacccattgacgacgtccgaccacgggaccacgcgccgactcacgccgcttgatatgccgggctggatgtatcctgaaaccctgggaccaccttggtcgcacccggagccaaccctccgatcctgtccttcagactgacatcgatcctgctcaacaagctcttgttcgccgtcgctggaggtttcgccgagacctttttggaaggaggaggtccggccggggtgggcttggtcgtcttcttggggccggtcggggtgggtctctgaacgagggtcgtaggagttcggctggaactcggacctgcggcgggtccggcgggtatccgatcaaagaggggttgctggggtgataatttcgttcgggtcgtcagaactggtgcgggaaggtcgggttgaagttgggtaaggatcgaggtaggtagagactcagacgggtcgataatgtagatgatgtggactttgcgttgactttctgcacaatgtggaagacacacattgacgttttcgtcaacttccgttttttcgacaagtatacaagctcgactcacgtccgtcgattgcctctgcaaacgaccgagcggaacaaacgccatcaacagctgaaaccaaaaccgactcgattttccgaacgacatactatcgttgaaagagtgaaacgcccgtttggcgtccgaaggtctcctcaaggtgaccagggcgattcccatgctgagaccgttctgatcgtacaagactttggcagaggtgacgttgttctcgccgacggaatgggcgaagagttcctgcaggacgtgacaagtaactcgggatcagtccaggtcatcatacctccccgcaaatatggaaaggctcgactcctcaccttgacatcattgtcaccgacgtcgtccaagggaagtccggtgatcatcaccctgaaaggtcccgcacgttcgtcgtccccatcgacccattcgaaaccatcgccggtccgtcgagatgtcatgccaggtcgcgtctctgcgggtgccgtggctcctgcgttgtagtacgggttgtgggatcgaaacgtggccatttcgtaggtcaatcgactcgcgtgatgatggtctgattcgaccggcgggtttgttgatgaatgatgatggcagtagagtttacgattgcgtatgatgataggagatgcacatccagggtgaaagtaaccacccacccagccgctgcatggctctctgcgttgttaggttctgcaggacaattgacgcattacgtaagcgtctcgatggggcgttgctgctcgcatggtggggtccccgcatcacatccatctcctcgccagagtgagtagcttccaggttgctggcacatgcatgcatcaaccaggccagatcgatcatcaggatatttcttgcttctcgacttcgctctccccctctccacattcgatacttgccaaaatcttcattcatcaggacattacatataccccttcaccagataccctacaaatcgatacgaatagcgcaagaatggccatgcaacgaggcgtaagtcatcgcgcacacgacctcgtccagaaacgattactcatacctcgatgtctgcccgtacctcacctgcaaacttcggctcgacgtagatcgtcaaatgtaagtcctttgactatagttgatgggcatctcagtgaggcacaactagctgacccgaaattgccttgctcccgtgcttcagccgtcctgtcgggagacacgatcatcgtcaggcccgaacaacctcctgtcaagggccaggccgctaaagaacggtacgccatcattccccgtacaggcaagagacagtatcgttgagatattgaaatcttctggtgctctcccagcgtaatacacctctccggggtcgccgcgccacgactcggcagtatggtccgtgaagacgaggtacgcattgaccctacttccagagcgcatcccatcggtcgaagcctattcttacccacgcccataacttgttagcctttcgctttcgcttcacgagaattcctccgacctcagctcgtcgggaagctcgttcaatacaccatcagccatagcgtagaagggaacaagacctcttcgaatgggtcgcccgtgagtacactgccgtcgtgcggtgatcgcccgtgtcggctcccaatggacacgtccgagctaaagtgatgtcgtccatgcacatcgtcaggtcgaccgggaatacggaatcatgtacgccgcgcctgctagccctggtggacctcctcaggatatcgccatgatggccgtatcgaacggatgggccaaggtccgcgaagccggtggggaaggcgaagatgccgtccgtcgactcggtgcggacgaagccaaacgtagggaatccctgcgtcaggctgaatccgaggctcagacggccgagaaggggctatgggcgcccacgggggagagccagaggacggtctctttccagatgcctgcggactctcaagcattcctcaacgactacaagggacaggagctcgaggccatcgtcgagcaggtccgggacgggagcagtatccgcgttcggctcttgctcgaggatgggtctcatcagtttgtcaacctcgctctggcaggtgtcaaatcccccaaggcgttcagcggcagggacggtgaattcaacgggacgagcgaagagtggggcgaagaagccaagttcttcaccgagagtcgattgttgcaacgcgggatcaaggtccagctcttgtccgctcccatctcgctcggcgctcctcctatcgggggcggcaagaccgccgggggtggtcttcccgctcctcaatcggtcacgagcaatatcatgatcggaaccgccgtgcatccgaacgggaacattgccgaattcctgctcgcccagggtttggccaaggtcatcgattggcacgccgggatcctctcctcggcaggtgggatggaccgactacgcgcggccgaacgatccgccaaggacaagaaggccggggtgtgggaaaactacgtcgccccctcaaagggaggctcggcccaaggaaacgtggccaacggatcggctgcccccgtgggtcctcagacaaagggaaacagctttgatgcgaccgtcgtcagggtctggaacgccgatacgatcagcgtcatcgaaaagggggacgcgagtggcaaggagagacgaatgactctggcctctgtgcgagcacccaggtgaggacaaggtctgttggatctggtcgacggatcgccgctgatagggacgtgtcataggggtaacgataaccgcaacctattctacgccaacgaagccaaagagtacgtctcctctcaccttgggatgagaccacgacttttctgatgcgagaacatatggtcctgacagattcctgcggaaaaagctcatcggaaagaccgtcaatgtttacatcgactacgtcaagcccaaggaaggggactacgatgagaaagagtgtgttaccgttcgatacggaggtgctcacaggtgggtttttcggagaagcgatattgattcgctgccggcgtgctaatggtgttcgggttcgtctcgcagcaacgtttcggagcaactggtggagaagggttacgcgaccgttctgaggcacaagaaggacgacgaggaccggtcgaccgagctcgacaagctcatcgtagccgagcaagcgtaagttttcatgcagtttgcaaacgggaatctgcactgttgaagcgctttctcaaacagtgccgtaacggaaggtcggggcatgcactctgccaaagaggtctctctgcctcgtgtcgtcgacgcttccgaggtgcgtcgagagcctagtcaggccgttactgcttttcgtctgattcatctgcattccatgctcagaacggcaccaaagccgctcaattcttgccatcctggaagcgagccggcaagcaccaagctctcgtcgactttgtcgcttccgggtctagattcaagttgttcttgccaaaggaaaacaagaaaatcaccttcgttttagccggtcagtcacaggccactctacgaaaggcgaagtcgcacattgtagctaacagtagctctacctacctatcgtcaggtgtcaaggcgcctcgtgccgctcgaacaggcgaaaagggggagccttacggaagcgagggtcaaaagtggaccaatacccgttacatgcagcgagatgtcgagatcagtcagtacagtcagaccccctttgacctggcaatgcctttgattgacgtatcaacgtgcagctttcgatagcaccgacaaacagggtgggtttatcggtaccatgtacagcaatggtcagaacgttgccgtcgaactgcttcgtgaagggtgagctggaatgagcgtcgagaagcagtcaaaagtctgatacatgatattcgttcgcaatcactcttcagtttggcgagcacccacgactactctgctgccaacctttcgtatgccaaggagctgtacgacgctgaagccggtgccaaaaaagagaagaagaatgtgagtggctatcttgtgctttcgtagcctgcgtcgggatctgacgcgggatgccatgtcagatctggtcttcatacgatgaaacggccgaggaggaagtcaaggtggaccagagcggatcggctcttcccgctcaatacctcgacgtggtggtgtcatcggtcaaggataccgctccgttcggtttctccgtacaggtcctctcaacagacagtacgtaccggccaatctacgccatatttgcgaattctgattaatagtgattgcgcaggcgctgccgctctggaaaagcttatgaaagactttgccgcccatcacaagacggctcgtgctcccgctggatggacaccgaggaccggcgagatcgtttcagcccagtttagcgaagacgaccaatggtaggtcgttcctgcgtcccatagcattggcttccgtcccttacgctcctgtccgcgcaggtaccgagcaaaggtcaagaggaccagtaacatgaagaaacaggccgaggtccgattcatcgattatggaaacgaagagactaccgcctacgccaggatgcgaccccttgatgccgcttttaagagcttgcccggtcaagctcaggaggccagattgagtttcgttcagcccgcatccctggactcggactacggtcacgaagccctcgatcgtttcaaacagttggccgaagtgagcatttgtaacccgaggcttcgtgtatctgtgaagattgctgaaatcttgctctcgaacttgttagggacgtaaattgattgccaacgtcgaccaacgtgaaggccaaatcctgcatttgcgcctgatcgaccccagcgaccctcaggctgcgtcggatcccttggcatgtctgaatgctgacatcttgagagacggtgagcctgaaatccgcacacgctgaattctcagaccgatcgagctgaccagttatgccgcattccaggtctcgccacaatcgacaagtctttgcgatatgcgtcggcttatcctcaggtggtacaaaagctcaatcaaggcacgtctacacgaaagaaaacatgtgtttgctgtttgtaagctaatctggaacgtttcctgatcgtgtagcgatggagggagccaagcgtgatcgtcttggaatcttcgagtgagttacagttactggttgagctatctcatgggaactttcgctgaagacccgttgttttggattaggtttggtgatgtcagcgaggactagaaagacgcggcagaagcatggctgtggggcaaaagcatgggtccgaatatgatgtagatgaaagacaggcgacgggtctaaagtatcgtcctctggcctctatgctatacatcatcttgcatcataacgtctgatactggcatcgtcgtcgatgagctgccggaagtaaaattcgggattctaccggatgtatttcctcaagcgcgatcacggaccatggaatgatgatcggcagaatgccccctccccccatcatttccagcacaggcctcacacagccaaagcacagtcggaatgttcaagtgatctctttgaacctgttgatcgttactcttcctcacggtttgacttattcggcatcctcacctcggatcgcctcgccgagcctccttcaacacataccttcttgccgagacgaacagtgtagaacatcacccaacacgacaacctgggacgacgttcagctgcacagaccccgttcatcagagaaaaaaagctcgtcaaaggtttgcctcttttgaaaccttcgatttcattcgtcatttccaagtttgccgaccaagcttcccctttgccttgccataggtctatacggtcagctgcatcgcggctcgatgagatacgccgtcgccatcattggctaagtcgtcgtcgacgagactctcgcgatcagaacgtaagcatttcaatgacatggtgtcgccttctggcgacatcgtcttttcactctcgatgcagtgatacccttgatcaagtcagtctacgacgtcagtatgctaatcaatcacgttgtggttcttaccgcacaggaatcggagcaatcttttctctcaacgcataccgccaaatacccctatcccacaatctcgatccgcgtcgacgatgacatatcaacagcatacccttcgattccaattccaagaagcttctgacacggagatgaccccaccgtgtccgacgcaagaacgctcgaacccgtttgatgatctcgccccgcctggtgcaatgatggtcgatgtggcgaacatcgaccctgcgactcacgacccgcacatgttcgagatgcagagacgaggagactatgctgacgaccaagaaatgcaagatgtatcgcaagacagtaaagctcaagaggttcctcgggttagtgaactcgaccttgccgctccagtcgctgtctttgttgctgatgataatgacctggcagacgagtgatcaagaggaactacagtccagtcgtcaggatctcctcgattccttcaaatccttttcgttttcgttgaacagccgctcaggattaccgacgcccccgacgcctacctaccagggcccgggtgagaatgccgggttccgacgcgcactggagcagtcccgtatgcaaggttcgcagaaccccaaaatcaacggggacctcttctcccctcctcagaatcagttcatgcacgacgactttgacagtcccttggcatccagcactccgaaattgttgagtcagaccaagaacgtttcttctgctgctcgatacaagattcctcctcctttacctttgcgacttggacgcaaggacaatggcaggtccgacaagaaagtcgaacccggtcagggcctcatggtattacctagtcccgtcgtcaagagtctacgtggagaagcgaacggaggttatccttcccagaacgtcagccccggattgaacagtctgccggactcgcctgatcgccgcccgaacgatgtcaagcagtctatccagcagtcagtgatgaaacgcgaggcgcaacttgcgcgacacaagatcctctcgaaacgtcctcctacaccccctcatacacccggcgacaaggtgtctctcatcgatgcaacccttctttcgccgcccccagtcactccgctttcgcctgaaacgcctgaccgcaagggggctcacttgcagccttctgtccaggcggttgatgtcattatcaccatgagcgacgaccacgaggaagaggcgcccgagttcagtgtcgcgcagaaggtcttgtcagagcatcctcttgatcctggatttctagaattgtacgaaatcagggacgaactcggctccggtggtttcggtttcgtctgctctgcctggagcaaagtcgaaaacgtagaggtggcggtcaaatttatctacaagaacaaactccaccagaaagctgttgtcaaagattggcatcggcggcagactgccccgggtatcttgcaccgggaccgacgtagcgccactggatatagattgattccgatggaggctgctattctccaatttgttcaacatcctggtatcgtcaatttcaaaggactgttcgaggactcgacattcttctacctggtcagtcggactaacaagatgctcgaagcaacagaactgacttgaggttttgccatgcgatagattcaagaacttcatgggtcaccttggaccaaacacaaagacagtcccgatcaaccgcaatatgccacctttatgggaccccattccgcgggagcccatattcagagctttgccgaatcatttagcgccaactctctaagcgcttctaccgcgtcgttctactctgaaacttcggagatggaccagtcgcattcctctagatctactttcagtgacctgtccgttccgagcactcctcacgatccttcccgacgaggatcggcgcctgaaacaagcttgggacctcctcccactcggcctcctttgatgcagcgaaggagcagccatgatctttttgaatgcatcgaggccaatgacagatttgacgagaacaaggccaaatacatcttcaagcaagtcggtaagtcctgtcgaccggtgctctggtgggcttgttcgggatcctgacgcgtgtacaaacttgctgacagtcgatgcggtggcctacttgcaccggaacggcgtatgccaccgcgatatcaaggacgaaaacatcgttattgacgacaagctttcagtgagcgtcataagcgacgatgacgatacgtaggagttaccttgttgacaataaatttccaggtcaagttgatcgattttggaagcgccgtgtgctacgatgctcgtttcgagcctccttactatgaccgatttttcggaactctgaactttgcctcctccggtaagtctcgtctcgcaggcgtttgggtacgatgatcgagagttcactcacgagctaccttcgcgcagaaatcttgcaaggttgtccatatcaggccgccccggcagaagtttggtctctcggagtcctgctctcgatcttgctcacgggagtccctcccttcgagacccagcgcgacgccgtctacgggcgaatcaggctcaagcactccatcactaaggatgcccatagcttgatacagaggtgcctccacccgaatcctcgttcccgctacaccattgagcaggtcaagcgacacaggtggttcgcgagagagggatcgagtaggctgccgttcagtctcttggacccaaggaactcgtacaaggcggagcaagcggcagatgctgctgctgaagcgaggcgcgacgtcttgaatggagcccggccgatgctgtacaaaggcggctccagtcgatcggtaagttttcattttcgttgttcgttgtggatatgactgaaaggaataattcccgatctgcgccgcatagaaccctcgcccttgaacgaagttccgaagaatgattcaacgacaagacatgatatgcgatgtggctcaactggtcctgtttccctccgaaaatcatatatacacggcgttttcccacatctcccaagtattgacttcagaattatatccccagctgtaccgaacgacatctttacacttgaccagctgatagtgaagattcttcataagaatgcagtgtcacgctcgtgcattcgaagcatgtcacgacgtctccacagtaccccaagacccagtccaagcattgaaattatacaatgaccccgcttgcttgttcgccctgatcgattcgccctggccagtcaagatctgcttctcatccttcagtaagctgaacgacacgtcgcctggtgtgaaagggacgagcgccatggcgataccatgctctggctcgagaacgatttgttggtaggaatcgtgaccggctttaatggcgagcaccaaccgggatgtgctacttgtgtcgcctggcatggtcactgtgagcgagatgacgtcttgcgcctgggttccacgagtcaatgcaaccaagtcagaaagactgatcagctgatggcccaagcagtgaatgacttacaaactcggctcgatcgggcttgccgacttcgtccccctcgacttgacaatctcggctgtacaaccgataactcaagtacaccctcgtctcctaccaacccggaagcatcagcggcgttcgtttagtcgggtacccactttctcggctgacttaccgtctccgagctcaaagagacgcccttgtaccgcctgatgaaccactcggtcatctttctccatccttcatgcggcatcccctctgtccacctctctgatccaggctgtgcgcccaagatcgggccgatatcttcccatcacacccagcatacgcttgatcgtcagccctcctacagctatatgagactggacacgggactcacagtgagactcgccgtaatcgttccaactgatgatctggacgaaatccgggtcgatatccggggacaagatgttcaaccagcgagtagcatacaaatggtcgtctgaacggtagatccagttcctgtccgcatcatcggcaaacgataagcgggttgagtccgaggccgtacctcaaataatatagatgtttacgccgggcgcagacttacttgttccaagcccagtcgcccgtcttgccgtaatgcgtgaagaaccaaggggaaacggccgccatgtaggtcttgttctatatcatccaggatcagtgcgacgtgcgggcccgtgcgtttagctacattcttgggcatgtcagcacgagaggagggggacctacgctttgaacgaacggtctatcctcgatgacgctggtcgtataattacccatcggcctgagcatcacaaggatcgacacatgcatcagtgtctcgtgcttctcataaaatgtaacacgaatgcagaaagactgaccaagcagcgttccagttcaagaccccgtctacgtgatccatacccaggatcttctccggcggtaagaaaaacgccgggataaagtagatctgcaatgcccgtcaatcctcgatcagtttctcatccatgcaagaccgaagatgcgccgcgctgtaagaaatgacgtctactcgcctcttcgcccctttcccgacaggctgcaaggaacccttcccacccggccccaccgaattgactctccccaccgccgaacgtcgagaggacgactttgccctgatggcgccccgaagcgtcgcttcgggtggttccactaggtacccggagttgagatgggaaagctgcgaattcgagtacgaggtcgacgagggaggacatgtcttcgtgggtggtcgaggggaggacgttcatatccaggctgatgaacaacttggggctcgactttggcctgccgcctctttgcacagtctcgtcacggtttcgatccgaagtgaggaggttccgcgaggccgatcgataagccgatcgagctcgtgtcgattgccattcttccggccctaggttgagtgccaaggcgtccacacccgtctgagcggccaggtcgagcgtggacgtccagttcgagtcggtatacgggtaagtgtttcccagctatcggtcaccaggcgagtttggataaagttcatgaatggaggaacaggaatgagaagaaagatgagtctatcgatcgtttcacacggtttgtgagggagactgaccatgaaatgtgcggtgacgagcttgtccctcttcttcttctccttctccttccccgcttcctccccgcccggacctaccagggtagcttcctcttgatccaatcccccctgaaccaccttctctttgacgatcttgggctcgacacctccccgagtgaaccgggataacccggatttcaaaccagacgtgctcgacctccacattcccgtcagacctaggacgacaagggtgaggagcaatgaaaagtggatgatccgggtgggcgagaggacggttttcatctactaccgctattacaccgggggcgttggtcgatgggaggtatcgacggggaaagtttgtgttgtgtgatagtgtcggtcgaacgtttcatagttgatgctgtatgagatgagatgatgccttgcttgagcctcgatcccaaagatgtggatacccctcggtcaaccggaagtaattactcggaatcaaaaacggggaccgtgagtgaatttaacgtaattttacgtgaatcgtggcttgacctttctggggaacgacgggaatttgttttgtttttcagagtttgcgcgtggcagatcgcacaaacacggaaaagttgaacagagagtctatgtcatgatgacgatgtcgaaggattggaaaccacaaggacggatagatagacagagtggtgtatgaacaagtcgtacgacgaaatcgagtgacaacatggcttgatacatgatacgagtgtgtgatatgcaatctgaagtgatgagaacttgatcaataggttttttggtcaaagccggcgcgaggaggggcaacgacgagagcgagcgacgcgcgcgtgaaaggacgagaatcgagaatcgtacgaggcagactacacgccaggtcggtcgtcgtggttccattgttgatatacttcgacactcactgaccttcaagcgatggccactctaccatctcctcccctctccacaacgcttcacctcgaactcctctcatcatgtccgtcacttcaatcaacaacaagcccctcccggcctcggcccacgtctcgaccaagagccagcctcaacaacaccaggctcacaagcagggcgacctccgttccgaaactcgaacgagccagtacagcaacttttggaacaaggattccgcccaggataccgaagccgatagggccaacaggttggaccagtacaccgacgtcatcaacggtgagtctcgctccatcgtccccgtttctcctctgttgtgcttttggtatcgggatcgctaatttctttctttcctttccggtccctcctttttcatggctataggatactatgacggtgcgaccgagctgtacgagtacggatggggcacttcgttccacttttcccgattctacaagggagaaggtttcaacgcttccgtgagtttggcatcgcttttcacgggagcgtgttttgtatgtttggaaggaacgagctgaccacctcaaactcgtcttccctgcctacccttgctccttcctattcctcacccggctcctctttccacccactcacctgccccgcctacgctgacgtccgcagttggctcgtcacgagcactaccttgccgcccagatcggtctcaaaaagggcatgaaagtcctcgacgtcgggtgcggtgtcggtggacccgcgcgccagatcgccaactttaccgacgcgaggatcacggggatcaacaacaatgatttccagttggcccgtgcgaggaaatacacggaaaaggccgggttgagtcatctggtcgatttcaaaaagggggatttcatgaaactttccgagcagtttggggaaaactcgtttgatgccggtgagtcccggatccggagcgtccaagacggggaggacggaccaggaagctgatgacgacgagtttgtccgccactcatctgctagtctacgctatcgaggctacctgccacgctcctactttcgagggcgtctacggcgagatcttcaaggtcctcaagcccggtggtgtctttggagtttacgaatgggtcatgaccgaccgttacgacgcttccaacccggaacaccgaaagatcgcgcacgagatcgagctcggggacgggattcccgagatgagggggtacgacaacgctcgacaggcgttgaagagcgtcgggttcgtcatcgagcacgaagaggatctcgccgagcgggaggatcacgtaccttggtactaccccctcgagggtgatatccgcaaggcccagactttgtgggacggtgagtctacattcaaggcatcgcaacgttcgtccagttgcacgagactgacttggtctgcccccccccccctggccttgtcggtacagcctttacctgttggaggacctctcgaatgggttcagccgtaacccagaacgttgtctggtgcctcgaaaagttcggcatggtccccaagggaacctactcggtcggtgaggacctcaaggtggcaggaaacgccctcgtcgccggtggacagagcaagctgttcacgtgagtttgcgactcgggtcgttcgggtagccaatcaagacggagagactgatggagattgatgatacgtttgtgtgtttgcgatacagtcccatggctttgtggatcgtccgaaaggtgagcacgagcctggtaccatatcgctacagaccgcctgagcaaccgctgacatatctctccatatcattgttagcccgagaactgatcggatccgaacagtcctctccattccaaaactctcattctcacacggacgatacccccatgttcatgcctctctccgtgattcttcccttctcagttgttatcatttgccacatagacgtcgttgctcatgggcatctactcgttccgggttctatctatattcatcgatcgcgtgatttctgcctggcgtcatgtcggtcacgacagatgtcttgtgtgggtactgcgcagctttcgtgcccgtacgctggaagcctgccgaggtcaatgactgacgtgatggtgtggcaagacaaggagaccgggagagggcttgtttgtgacaaaggagggagacggtggcgtgatcgatcgatgacgactcaattcttacgcacacatttatatatatatatactggtacatgatcgtggcgtggacgatcgggctcgacggcgtatatcaacagaaccctcgcagagcaccctctcctcgaccatgacttcgctcggtatggtcccctcatacgttgacagcagtcggattggtagcgcaacccctactgccatcctcctcaacttgcactcctctgactacccgacgatcgctaccattccgcctttgagcttctatactggtgttgcatcgccgagtacgaccggtcaagatgctacttggatttcggtggcgactgatacgcctgagaatcttgatttggaggagaaaaagggaggtggccggatcggcgagaagcccaagggtggaaaggtaaaagtcaagaatcgcaacacggacttcgggaagtggtccgaacaggctttcaagaactcgacagaggtcaccaagatagtcaactcgcttcgaaggcttggagcattgagaaagcggtcggtagagaatagtaaaagtatcctacatgatctactgaacagggtcaacttgcaattgcaatacaaatccggagacgagggacattaccaaagcctggaagataccctcaagcgggcgattgaggctgctgaagggacagaagcagaagaatcggcaatcaatgagtttgtgaaggcgtatgacgaaacttcggcgtggttggatggagagcaagagtcgataggcgagacgctgcgcgctcctggcagttttacgttagccggtagcgtaggacttgcagccttatggagctttatgtagcctttcatatgaaagtatttattgtacataaagtcattataaataatgcacacatgtgctggcgtagctctgatgactagcggtatcgagacttcatccgatacagcggcacgtccgcggaggaaagacctgcataacaatgagaaggttgtggagcggttgggctttcgttcgccgcttactcgtcacccttgagagggccgtttttatttaattggagttggccggatgataaggtcgattaccgggacactgtgttcggataggcttctttgccaattgaggtgagacttaagttcaatcccgctttgcgattcatgggtattgttccagcggaccgatagagcggtcgaaggtgggagcaatgaccaaattatgatgaggatgcaaaacgtccagaaatgttcgacgctgtgattgccagatccctcagcaaccgtttcgctactccagacagaaatgaacaaggatctaccttggggttaccaaagactcgccggcctgtgatccctgcttgaacgatagctgtagtcaatcacgttaagaaagcgttgggctagtctcattgatcagcatgtacgctctatcattggtaaagagtcggtcctcaaagaacgacgaatacctccatcccccaacgagagactgaatactaggaccgagagttcttaatgacgccactaactatatttctcacctttcgctcactcggcccgtctgttcacttggattctaaagtttatgttcttttctctgcgggcacgcctagcggtacgtcaatagcagcgccgtcttcagatcacgacatcaaaggacgtgtccaaaggcggagtttccgcagcacatcacgagcaggacaaaaaggagtgccggacagactaaatcgttccgtgcgtaatcaagggaagctggggatgggttgaaaatgctatgaaagcaatgcctcgtcgtcaagagcaaacaaacgagtgcgtggtgaagggaaggtttagacggtcaaaagaggccattacaaagaaaggagaatcactcacatactgaacatactggtatgtcctttgcttagcgacgaaacagagatataagagatttcaagggcggcgtttgcatgatcatagtaactctccaggcgctgccagaggtgaacttctcgccattcaatcagcacaagatgtctttgacaccgtcatccacaaacctccagcatcttgccaactcccgcatacttcgaaggccaagggcctaggaatcctccttccatcaactcgggcgcctacgacaccaattctttcgcctcgcacgggtcttttcacattaccatgcctgaaacagacgctactattaccatcaattctacagtcgccgcaacgaacgcagattcggaaccgtggtcaatcgcgccaagggacccgaagggctcagtcaggtacaaaggaggaaagagcggaaagagaggaaggaaagaacagagagagaaaacgccgttcggtaaagcgttcaagaatcaatacaacacccccatggtgagaaacatggtgcaaagtctccgagttgggcgcgtcgcgcgtccgaaacgagacgtcgaggatccgcgtcgcgagattctgcaagagctactccgcctgctacaagtcatcctttccgggaaacaaggtgatgagggccactacaaggatttggaagagagcctgaagtctgcaatcagtccgaaaggttctccgctggacgaaacaaggattcttggttttgtcgactctttcgatagcacagttagctggttggaaggagaaagagagggagcagctgcgacggtcagggcgtccaagaacaatctattggtcggtgccgccgtaggggcgtttgtactgggacagggtctgtgttgatatcagaacagactgtatcgtcgacgaaatggattcggatgaggcaatgtttagtatggcaaatcggctgatacttcgtggtctgctcgttgtagagccagcgagtttgatcgcccttcaatgtagagtaccggtctatacagtacggcatttgtctccttgatcgactcctttatgattggctgtatgacaccagctaagcagcgccggctcagtgatcagcgacagacttcagccattctctctgcacacgactcgtcagaggaaactcacgtgcagttctgccttgcgcgcgactctgctacttgattgtgcaaagaaatagtagttacgtgcgatatcgcttgattgtcacattattgtcacgacatctcaacacatggaggacgttcgatgcgtcagtctttcatcctttatacgtctcgtgagctgagggctggtattatcgcctccgtccagctttatcagggactttgagcaggcactccgaaacctttcgagcatgagggttgcaaagtcaaggacatctccctgtcgcgagctaaaagtcgaccactggacgagcctttcgacgtcttgctccgtcgcgttcgctagctaacagtctacaaggtcttttcctcctctgacgtgatcaggcgcccgctcaaaggaagacgatcgagaaccatgccgcggcattctcaaggtgttcgagatgatccctatacatcctatgctatcagtggcggcggacaatgagatgcgccttctatacttgttgtattgcattttctgaccgaccaaacttgggctcttccgttacaggacaaagaccagagtctaaatctatcttacatggatgtctccattctcacacaggccgttcagcaccaagcaacggcctcggactcgttcgtaggcggctcaagccatacgactgcgaccccaccagatttcatcactcctgattgggcagaccctacatccgtctcaatctcttgtcctggtacagagactgtgcctgtgccatcatgggcgaccgatgctcggaaggtgcaaatggtcctggtcgacaaccacccagctcgtccgaaaccacatcgaaagataccgccttggctttgcgaaaaaggtggcgcgatcgatagcttccaagcgggttggtacctgatatatcgagagcgacttaccgaggatatcgacgagctagaaaggctgaataaggtcaaagacaacctcgaggcatgccttaaacacatacgccacatgcaggtctatgcattttcagtccatccctggggcgacaaggtcacccgtgggtattacttggcgcacatccgtgacgccctcagacgagcttcagccgacctccccgagtggaatttgactatagacgaagtgatcgcgcaatgtagactcgtggttcggcgggtggacgccatgttgaaagatttccccgagtctacttctgcggaaccgacttcaactaatgcagcgggcgaaccgtacaacggcgaagattcgttttctattgcgtgggtcatggcagctgtcgctgctgccgccgtttaggcggagtctatacgggaagagatatagcgtgatcggccggacaaatgagagtttagcagaggcatcttactatacatgcatatattttcaggctataaacttgatcaatagcagtgaactgtcaagcctggttggagcagtcgccgaaccggtctttctaccagattgttggtgttttatgctcagactaggccgcagtcccagtgtttgacctaccctgaagcgcaacggtgcgcgatcagctcgactgcctctgtgcgtgggatgactctgagggcgcgcgatgcgcgagtgataccgggtcaccagttatagagttacagtacagtaccccggatcgccgagcccgtgcaactggacgctccatccggcctggaacttgatcatcctcacgctaatccttgcaagcccagacggcctcgtctcgatcattcccagctggtctgaccggggtcgggatcaagtgcgtccaaagaacagccccgtcgcctcgaccgaatgacgacggctacaaataagatttcatccaaaagagacgcataaatcgacgtgaaaaacacacacacggactcgtcatcaacgatgaccccccttcttcccacccacaccattccctttatcgggaagaccgggacctaatacccgcccgccgcgggggccttttctccctccctcctcaggctgagaaggatctctttcatcctcgccagatccgacccgccgggtaccgaagctcggagggtcttgctctctacggggtgtcatatgaatgacgagcgagatatcgtcagcatcgggatacgttcccggggcagttcggatcggctgggaggaggagtaggaggagtgacggatcagactggggacgcgctggacttacgagagttttggaggtcgacgagatcggtgatccgttcccaagtcgtccccttggagattgattcttgcagggtctccaagaacgccttttcatcctccctgaacgcacaccgagccgcatttccgaatcccttatcagctccgctacatcggggaccacatgccacagatgacccaggaagggaggggagggggagacctacttgttcttcttgatactcctctccttttgctcgttgtacttttcataaaacgcgtcaatggccttttcagccttcaagacgacctcctcctttttcctcttgctctcctcgtcccgcttcttgatctcttcccgttgtttctctctccacgcttggatagcgggcgagtcggactcggcgacttgggtagcggtgaactgaggggcggggaggacggaagagtaggtgtgcccgccgttgccattgcccatacccatacccatgccggaggattgttgaccctgaggagcggtgtacggttgagaaggataaggggtagctccgtacgggatggtctagacggcaaaaaaaagaggttgacgtgtgagtaaatggcggggaaacgaaagagtgctgggcgaaaccccgaatgatcggacccgaacgctgctcacctcgatggcactggcttcacccccgatatcggggaaactactctcaaacctcgccctctcctcatccgcctcatctcccgtgccttcatggccggtcactttgaaatcgttgttcgccggggtcggagcgtcaaacgaggggaaattggacatggggtcgagtagcgagtcgttggcggtgctgttggttgcgggttccacaggagcaggattggattgttgagccgctggagaagaaagtccggctgatgagagatagtcgatccgtgtggaacgagatcagctggagcgtgaggtgcggttcaccatgggcaggtgagattgctcaccgagatcggggaatccatccatcccagacccagatccggcattgacatcttcaccctggttgttaccgcccgacccggaaaagaggtcggcatcctcgcctaaaagacatcaagaaccatgtagacggtcaagtcgatcagcgcatgtccttggtggtcgagtcgtgtgtggtgtggtgtggctcaccgagggctgctcgttctcgcgcgaggtaagctgctactgcgtcgtcgtctgccattctgtctgaagatttatcgtttgaagaggtcgagtggttgtctatagatctggaggtatcaatggagggaagtgatgctcatagcctgctgtacattgttgatgatggtatactcgtgagtgtgttcgtcattgcgtgtcaaccccgagtagctagctagctagctgatagtcgattgacagtgacaagtagtattctcgatgtaaagacacgtcatagtcgatgcagaacggcgcgccgtgattaatttgataacagctacgtaactatatacttccgatcttcccccaatttgaatccgaaccgaccactcttcggacgtaaatccacctctccaggaatatggcccgttccgaccatattattattgttcgaacagtccaactacactgtacttgttgcatagaccacccgtcgtcctacaaactctccaacaaccaagacgacaagaagagcatggtactcgatctataagatccaagatccccgttctgatcgtgacggtgcaacctcaaacgatgatcccgctaccacacatcacgcgccgacaacttgtcttctccctcatcctctcgatcgcctcgctcgtcttcctcctcacttcgctcatcctccgtccgaccgatccggccgacccatcaagtctctctacgggaggtcgcaagtttgacccttgggccgtcaaatcttcggcagccgaggggatccgatgggtggttccggaaaaggtccgggccaactttgggttcggtagcgggtacatccccgtcaacgagagaccgctggccgaggatcagaccggggccgggttgttcgatatcactgaactcgagacgggcctatacgctccctcttcctcgtcatccggctcgtcctcctcggtgtcctcatcccgactaggcttgtcccacggatggaacaccgtcaagaacaagtccagctcggtctggacgtcccttgggaacacgctctcctcgtcctccttccccaacccgttctcctcgtcctcgtcgtcttctcgaccatgcgtgacggattgggacgacctgccgttcgagaacaaggcgttcaaggagtgggaatactctcgagggctcatctacgaggggacgggcgcgagggtccagaggttcttggaaaaggcgaggagcggcagagggttcgtcgtcgccgtcgtcgggggcagcgtcagtaaaggtcgaggattacccaaggttccctttgacgtcgaggtggggaggtacgtcgtcggcggatcctcgtcctcgtcgtcgagcgaggaggagacgggcgaaaaggccccgaggcatcaacatggaaaacgactcgtctcctcttccttcccccaagatcgggatccgagcaagacccaaaacctgtacaacccgttcaacatgcatatgcaggtattcgagtacctggacgataggttccccgccatgcccctcgaatatggagagatgcgcccgagggcggacgccagcagcaacagcaacaacaacgacggcgacaacgatgacgaggatgcgcctctgctgaacctgacgagcggagtcgaaccgggacaccagaccgccacgcatcgctcgcatcaccgcggggagaaccaattcatcaacggcgctcaaggaggagtgggctccgactatttcgccgggtgttggaaggagcatctcggcgaggatgtcgatctcgtcatcgtggagctggggatcaacgatgcgaggtcattagaggtcatggagaactatgaactgttgctcagaagcttgctggagatgggttccaggccagcggtgatcaacgtccagtgagtcgcttgcgatatctgggcatgtacacgtgacccggcaattgctgaaacgagttctgggccgtctaggacatttactctcctcttttcgaccctatcacaagcctcttcgatgcacatcgatgtcgccgcgtactatgatacacccgtcatctctctgcgcgacgtcctccttccccggatcctgaacgatccgacggctaatccagctccagggggtgtcttgggtccggccgccaaggtcggtctcgaggtgaaaaagtggttcagaaacgtccctgaagacgaaaagatcgagggggacgccaaggtggtcgacggggtcgatctgatgcatgtgagtggggaagggggagccgttgaaagtatatagacccagacgagtgcgattgccaacgagtgcccctcgttgcatccattcagataagtcatcacggacatagcctgctcgccgaattggtggtccactacctacaactccagatcgcccagatggaagagtacgacctgtacctagatggagaagaggaggaatcgttcgacgacgacgtcgaactgacagacatccctggcatgttgctctcctcggcttattcgcccaacaagcgggtcagacggacgaacccttcttgcacgagcacaaactcggcctttgcatcgaggaggcttctcttgccggacaattccactgggtggtgagattgcgcggcagaagttgtccctgcacacacgcagtctaacgccctaatgaacctcgcagggatacctataactggggcgagaaacgttatctcgtctccaacaagccaggctcgagaatcacgttccccattcatactcaggcaaaggctggacgagacgggcgaggcgagggatacgtcaagatcggacacttgcggagcaaggtcttgggtctcggcagcatcgcctgctgggtggacgatcgggaggacgaaaagacgagggtggatggatggtgggatgtcaaggaaaggaatatgggaatgtgagtaacaggctggcgcatcctggtttcatctcagccgtgcgacagtcagctgaccctgactcctacccgtcatgcccgtaggatctcgaccatcagggaagatttgttgccaggccgacataccctcacatgcgaggtgctagaagataccctagatccgaagggtggcaccgaattccggctgatttcggtattgaccgattgatcctcccagatcaggcgtctcgagttctcgtttacaggttgtataaatctcccactggtcgtatacatgtatgaatggattatacccgcgcaccgtccgtcctccgatccccctttcctatcggctgtccaaagggaagggtccgtagtgggtgatgttcccaaaaagaatatgagaggatatcgaattcgtcgcgaggaagagagggtgaatatcgcatcgtgggtgagggcggatccgccgggtctgctgtccagactagaccttccctgttgtccatcgtccggacgtctactttctcttgcccttggcggccttttgcggtccactcatctccttggccgagaccttctcggccaccccggcttcctcgcccatccagtcgaaatcgctgatcccgaacgacgagctctgcttggtcgagggacctccttgctgctcgccagcaggcgtttcggacgagggagagttggctccgaacctcgctcggaatcgtgcgagccttccaccctcttcttctccgcctccccttcgaccttcgctagccgggttccagagggggttgttggtcacgtcccgtgtcaatcgcaaggtcgctggggatggcgatgtcgtatacgacgtgaaagacgatccatcggataggatgacgagttgagggtagatggcagggaggggattggggatccttgcagccttttgggtatgtgttcgggatttccaggcggcaggtgctcgggcggtgtaggtcctcgtcgaggacgaagacgacgaggccgccgccgacacgatgggccggagcatggatcgatgacagttagtgcagagagacatcttgaaacgtggaccggtggttttgacagtgtgaatcgtggtatcggccgtcgttgcacgactaccgtatcaacacggagcatatcatcatgatgttgcatgttgccttgtaacttacttttgaagttgtcgatcaatcctcgcgcgtcaaatgaaagcgcgatctgaagcgcacaatgacgataggggagggaggtatgtcgatagctagttgtattctcagcaacatcaatcgtggccatatcgtacaggtcatacatatttcatacagaggaggcacaaggtacacccagtgaaatcaaatacaatgtttggaacgaaggccgatagccgaaaggctagtccttggactttttgctcttcttctgcaaattgaaacgaacccatctcgttcaataagttcactgctggtcctgcagccagcaagccaatctctgtagctcacctccttcttgaccttcttctccttcttgacctcatttactgcctcgtcatcgtcaccatctcgtttccgcttcttgccctctgccttgtcgctcgacttttccttcttctcttttttctctttcttctccttcctcttcttctccttttcgtcgacctcctcggtgagctcgagcttgacgttcgccgactcttcatcttcgaccttgacagccgcctccactccaccctcctctgccctctccttgcccttcttcttatccttcttgtcccgcttctccttcttgtcctttttctcctttttcaccttgccatccatcacaggcgaaggtgcttcggacctcacggcgttgatatccccagccgatccgagtccagccccaccgacccctcgttccgcctgtcgatcctcctctgcctcgacctcgatcttgactttgacgtcctcctcttcatcgacctcgtcggccccggtatcgaacaccgtcttcttgccttcgaaccccttggcgacctcgttgtacgcttcgggcttggcatcgtcaaactcggggacgggttgaccttcccgctgggctttacgctgggccagtcgacgtcgaaagtattcgcccaccgagatcttggcgacggtaatcttgtggtcgtccagggcgtcctcggcatcggaagtcgaactgcgtgatcgtccgtctacggctcggaggttggagggacctggggtgggaggttgggatagcggggaaggagaggctgggagggaggagatggggatccccaagatctcggccatggcagccggggacgaggcggcgagtcgtttagaccggacgtacttggatcgggaagagtttcctagctgtcgaggtaccggggcgacgatggggatatcggcagtgacgacctcggtctcgtccgacgccgtatcaaagaccatcggaccgggactggtcgtcgtcgatgcgccctcgctctcggcaccttctacgtgtgcagaccctgcctttttcaaccgagcaaagagcgaattcaacccttctccagctcctccaatctcggcgccttccttcatggctcgggcgacaccaataccggacgagtcgagcttccggacgaccttgatatgttcacggtttccctggttattctccgatccaagaccctgggtcggatcccatccgaacttggccaggtgttggtacgagaatcggttcgtatctgtttcgggactaagtaatcagacgagtcccgcccgtcgtacgagaggtggtccttagacgacctgtggcttaccctgactccatcccaggttcctcggatcgggcgcgatcttttgcttgttcttacgctcggagagacccatcttgaacgttcactgacttgcttgtgatgtatgttcagctcgactcagttgacgactagacacaccttgaatgcaatgactttaccgtgatctgattgaccttacctcggtcttgccctattcgaaattttgacccgagactcttcgtggacgcgttaaccaaaaatgccggcatccggcatttcgtaagtgacggacacgctcaaacggatcatgtccgtcagatatgaaacgtcatttcttcccttcgttcaaacacgcttaacttcctgcagcgaacagagccatccatatcgatgaagcaaaatgatacaggcaggaattgtcatgtgtcacatgcatcaaatcaaaggaagtccagtaatccagggcccgccagctcatgcgtaccattggctactccaaatcaaaggggtaagactcgttcatgatcgactatacgatgtgggccctcggttcgacctggatcaagggttccaaaacgttcccaacagtgttgcaacttcatttcgcaaaggacaggctcattctggcttgcaaatggcagaagaagaatacgccatgacaaaggtccgaacaagacgagtggataagggggtgctttcggccgaggcgttcgcagattggcatagggagcatctaggaggagccatcccatctagccctgctaacgagctacaagatctctccaaggggtctcaccgatatccgaagctgaagccttatactccacaagaaattcagcgaagtgacatgtctccaaattgagaaggtcgccccgaatcgagtgtagatgtcagtgaagcctctgagtttcagagcgttgaaatgtccgacctaagtactggtccttcgactaccggagatctccaggagagtagttcgatgtcttctataaagaccgctgatgatcctagataaggggctataatcgttcgatcagctcaaaatctcagtgattcgcgatcgaaatagctagaactcgcgaatcgcaagaaatgttcttacgaaaaagaaaaattgtcgtaggcctgacatgcatgcgttcacggtgccggcagaagatctcacacggtcggcatgatttttcttcataaagccgttgcaaaacctaggccgcggccggcgatcgaattcgatcagcgcgagaagctgaagaaggtactctagcacaactgagtcctcggcgctcggcgtccgcccccggttgaaggtttgaagctctaactctaaataactttcaaatgaaaagcgctggctcgacggcacacaagcatcaatcatcccagctctcgaaaggcgattcaaagggcagtgaacgctcgccatgcgctcatcagagacagaacggtgaacatgtcaagccaaggtatgattctcaagaacgtaagaacgtatctcgcctcaagagatgctagatatcggccgacgcgtttgatcaaaggattacctgacattctcgatgcgatgagtcggactgcagtggcgcgcggaacagggctgttggcgcatataaagactcaatccatcgttcaacatccttgtagcgatcgcccgacagccactcactgtcctatcacattttgggagcgcctgcatacttctgtcccagatttcccaatcatcatacactctgggctcaccccttcatgacgatgtctcaatctcagcaaggctataaggcgcagataggccacaacgttccagccgatagcagctctgttgccctggtcagacagaggcgaggcggcgtagacatacggggttcggcaaaggtaaagatatccagccaagctcgagattatactgacaaaagcgttacggcaagccactccgattatacccaacgcgatagctcgagcgtcaagactgctgcttcgactggaggcggtccttcgttccgtgcacagtccacaaacagtggccagtgaagccgtgctctgtgctcttatacccggcttctgcttccatatctatcttcaatatatgtatgcaacaatgcgatgaatcgtactatcaaatttcaacgaaccaacccttcgaatccaggttgtgattgtatgcaaagggtttcttggagatctagcaaaatgccgcatcttttccttacgcccccctagccacttcgtcaggtcgactgcccggtacagctaccgaccttccacgtctacattagtctagcaccatgattcgaattgaggctttcccctcagagatttgaagaagaatacagaccacgtgatcggcgttcatcagcctgagtgccgtccccagcttctcctcttctttgttaagcaagcccttgcttttcctttcttgtattcgagttcagccccaagcggcatcctttattgaaccccacttcatgcgtatagcgatgccacgtacaaaggaggcttgaaaggaggatcaccgtaatctcctttcagaccaaactcgggctacgccgggtggtcacaatcgtaaaaggaaagcggcagttcgcgccttgtcggcgagcacgacctcacgccggtgcatacgtataaagccaagggaatcgggggtcgatctttcctatcagatcgctgctcccgtgagtatgaagccagacctacgaatcatactcggctctggcatcaacctcgtcccactttactcacagcatggcagacaagatccaaagcggcgatcgctcctcgttcaaaagaggcgctgcgggagagagacggcgacctttcgacgggaccggcctacaagtcgaccaatacactctggctgacatgtcgttgatgtcgggaatcctatcgagcatgaccaccgggtcgcgcgagacgaggtctttccgtcgaacggctgagtcgggcggttcgatttaaggcggcggcactacggacacccgctcgaccgacacaaagcaatgaaccgttcctcaatgacaagccggggctttgctgctcgatgatttactttgtcaggaatgtcaccatgtaacgcatgtactcgaggcgtggatgaacttgtcagaaatcgtcaaatgtcgtcatgacccgccgtgcgcgtgtatgtgttgtgttctagaatccccgtatccgctcgaacacctaggataattcgtgcacgacgacgtccccccattctccgtccaacttgtccctccccttgtcattcttcttggtccgataatctcccttgtctggctctttccccttgacttcgggattgttggcgaggtcgttgtgcatgaacgagttggtcatcgagttgatcttgaccaagagtttcgtcgccgagggggcggtcaccaagagggggaaatcggaaaacgtttggtctacggccagacggcgagtgtgcggagcaagggggtccgatgatcagtcgttagcagactgactttgcgagaggacgcgggattatggactcacgatcacacccgatgatcgagacgagactccctcccgtctttcgtatcagcccgctcagcctattaaagtgcgtgcgccaaagggtaaagccctcggagttgatcgtctgcgggtaccccgagcggatgtcggcttggcgtcagatacagacgtcaaaaggtgagattcgaaaggacgtaccaagatcgggactcgtggtggtgcttcctccatagcctttggaggtccaggcatgggtagagggtccaccctgatcgacgacccgagggcgtagacgtcagccacagccgcgctcccttgccgaccgacacgaggcgagactcaccaaggatccaacgcgacggctttcttgaccggcatcctcgagaacccctctggcggggccgtggacaagaggtgtaacaaggtccctcccccgaaactatgacctacgagggtcaaatcgtccgtctcgactttgcctcgccaggaatccaaccaggccgtcttggcatccactccggcgtcgagttgagctttcgggaggggaggtggaggtccgtcatcggtgtacagatggaaagagggtaaacccgagtgacccgttttgacgagcgtggaaaacgaagcgtaggcttcataaacctccgagactcggacgtcgagctgcatcgatcggagacgcatgacgtctggggttttgcctggcgaccagctgtgaagcgacgggacgagtattgatcatcagcctagcccagccgatccccaccacccgtttgagacgtcacgagacccgcattcctcgccgacgtgttcactcactccaattcctgaaatttgagataccccaacctgacctcttccccccctaccgtctcattcggatagaggatcacgcccggtccgctcccatccgcgtgagcgatggcgagtacgacgtttccctcgctggccagggccgagcagacggccgaataggcgttcttggtaccggcgagtccgtgtgagaagatgacgagtttgcgaggagggttcgatgttgtggacaacggggcgagggggtagaggggggcgccgagtctacctcctgtgaacttgaggatgggagctaggggcaggatatgaaggggtcgaggttagtagtcggctgttttcggaggccggaggagggtctaaaggatattcaagcatgtaagggaaaggctcacctgctgctcgcatcaacggatgatcgttggcgaacctcctccatccttccagcacgaattcgataggtctatatcggtggtatcatgtatgacgagacgacaaagaccaatttcaggggctcttcgagcacgaccacgacaaagaccaggaccgactaaaccatactgaccgtggtaaccaactgacgctcgtgccttgtttatccttctgccagaaccaacctttcgatgccggtttttcacacgggtagtagatcgaatactcgacctgcctcactcccaacgccgggattcctcgtccatcggtatctttcgtcgtcgtcgtcgtggacatcgatgacaatcggggtacgggatgggtgtatggatgatgtggcgtatgacgaagggtggcgtacccgaccgaatggggtccgggaaaggggatcgggagggttcccgtgatgatccctgggatgtaagatgacattgtgtccgacgacgtggcgagtttagcgaggtagcgttttgtgggtgtggtcatccattcgctcggtaaggtgaggtgtggtgtgtgtgacgagtgtataggatgttgattgaatgctgatgcgctgatgtcgatatgccagatggcttggatgtggaggatcggtcatcgtcccgggctggctattgctgatcgactgatgagatcagatcgaggcgggcaacgcggacgcggacgagagatacagtattgatagagatgacgtaagccacaatgacacagcaaaatgacgtacagcaaggtaattacgtcacatcatgatcacaacttctttcacgtgatcctagtggtgatctcgtgatcacgtgattttggtaacttactcggtcgagtgcgataataatgtcaaagcaactcctcgatggagagaggtttgcttgagttttaacagctaatcattatctgagcgccccgccacagcgtgatcattcatcaccaccaactccaaaagtagccacatcaaccatggctccctctcaactttcacagttgaaatccgcactatccactgccggactctcacggacgaattcgggaggtgggaaaaagggcggggccaacaagtctcaaggcaaggcagggttgaccaacaaggacagggaaaagaagcaacgcaagttggacgatatcaaacagagtctcaacaagtttgatgtcagggagacaaaagtcaagaatcacgtcgtagggagaggacaggatgtcaaggggacttcagggacgcccagtcagagtcgacaaaaggggctcgagatggtcagtccagggcgtgtctgccggccccgacctcccgatggatattcgactgacgattcgaacccctctcgggaatgatagcgaagagagactctcttgcccgagctcaaactccgtcgatccggccacacggggacgtttgtcgatcgtcgattcggtgaatccaacccgaacatcactcccgaagagcgtgcgctcgaacgtttcacccgggctcgggaagccgaacgtgggtccggcgggggtgggagtcgagcggggaggaaagccgtgttcaacctgaacgacgacgagtcgggtggacttggtttcggggacgacgatgccgatgaaggatcacggatcgggtcggctaaactcgggttcacgctgacccacggtgggagatccatcgacgagttgaagggggacgatttcgtagcccagggtttaggggacgatgatgacgacgaggacgacctcgaggacgatttcgggatcaacaggaccgtcgagggggaagaaggtgccgtcgagagggatcctacgaggaggaacaatttcggcggattcggtgacgacgccgggaacgaggacgtgagtgggtcggtggcctcgagggccgcgaagctcgatattgctggtcgggagatttcgaaaactcatcgcacggggtcgtgtctcctccgctcgtctctagcctgatcgtaaacggaccaagaacgagatcatgtccgaggtcattgccaagagcaagtcttacaaggtaggtaccccaagttcgactagaatcgtctctcaccctttctcctccgactgactgatcgcctgacgtccgtctgcgccatcccagcttgaacgtcaacaacaaaaagaactcgacgaggatatccggatggaattggacgaaggcttggatgacctccgagaactcctcaacgaatccataccgaccgacctcaaacgcggtaaagccaacctagacttttacaaggcgcccgccgccgtcgtttccgaggcggacgacggacagtccgccgccgaggggtcgagcaagaagaaaccagagacggatggggattacgaccagttcgtacgttccctcgcctttgatcgacgggcgaaacccaaggatcgtaccaagaccgaggaagaggtcgccaaggaggaagccgagaagctgcagcaggccgaagcggccaggttgaaacggatgagagggatcgtcgatgacgacgaggacgaggatgacgagaccgctggtggtaggaaacgacgcaggcaaaagggagggagagccccagaggcggacgatctggacgacgattatgccgatgggtacgaagacgatgcgcaagagtttgggctgggcgctggattgggcggtcgacagggggtcgacgaggagatgagcggcgaggatgaggacgaggagatgagcggcgaggatgaggacgaggaggacgatcttgaagatgaagatgatgatgatgacgacgacgaggatatggacgacgacctggcgtcagatctcgaagtcgagggtgaaaccaccgcgaaatcgtcgactgggaccgtcaaaaccgccgctggcaaaaaggaacggaccaagaaatcccgcgcctccacaagcgaaaaggtcatcccctttaccttcaagtgtcccgagagttacgacgatttcgaagccatcatcgacgggctcgaaaacaaggacgtcgagacggtcgtcaagcgaattcgaacgctgtaccacccgagtctcggcgaggggaacaaggagcggttacaggagctcctagggatcttgttggagcacatcatcaaccggggatcggaatccaacgatttcgctctgaccagcctgctcatgccccatatcaatgggctcgtcaacctgaacatcctctcggctgccgaacacttcaaggagaaactggccgagatgcatgccatccttttggataagctcgagaatgctaggaacgactcgtccgtctcgatctttcccgaggccggtgatctcgccatcctacggatgaccgggacgatctggtcgaccagtgatttctctcatccggtctccgtacctgcggccttgtacatggctcagtgtctatcgcaagcgcccgttagagataccggtgacattgcaaagggattgttcatgtcggccgtgttcttgcaggtgggttcataccgtattgtcagtcgccaattgatctcttacttacttcttcgcgccttttcgttcccgatgctagtacgaaacctactcgcagcgactcgtgccggaagcgctcaactttttggcgaccgccatcctcgccctcgcccccgcatcattcgacctcgaccctgtaccaggcaactttcctctgcggagcgatatccgtcagctgggcgtctacctgaaatccaaactcgctagcaagctctctgtacgaccggccgacctgccgagtctgatggattgcgacaagtttggaaccgagtacgagcaggacaaggtggatcttctcggattggctctgcgactggtaggacgatttgcagagatgcaaaaggacctgatcgcgttcatcgaagtgttcgagcccttttacgagatcgtgttcgccctgtcggctaccaacgtaccagcgagcatcaaggtgagtttgcgtcgccagccgaaaatatcggctcggtcatccgctgactggaaaatctcatatgtgtacaggccatttgcgacgaggagaacgagaagctggccaagttgctcggaatcgccggcaggatgcgaagacctttggagatgcagacccacaaggccatccccatcccccagtacgcgcctaagtttgacgtcgagtacagtcgaggaaagcgagtggacccggatgccgagaggaacgaagctgccaagctcaaggccatgtacaagaaggaacgcaagggagccatcagagagttgcgaaaggacgccaagtttttggccgtcgagcgcaacaaggagcagaagcagaaggatgcagattacgagaagcggatgcggagcgtggttgggtctatcacgacgacagaacgagccgaagaaaaggcagcagagaggtcagtcgcgggtcgatatgagagtttgatgattaccaggttcggaactgatttgtttgaccgatattttaattacgcttttccagagaaaagtcgcgggacaagcgacgtggtgggcgcaattagatggggtctcgtggtttatctcttggttatatcctgcttcatcactgtgtcatctgtactcgcatattgtatgaactattcatatcaagtaaaggttccccccttttctagctttcctatcgaattctcgacatcacgtgacgattttcgatatcttccgttccaaaagttgggcggcggcgttgagcgaaagtccagacttgatcaacagagcaacaggtaatgaaccagtatcttggtggacaccgagcttgacctcgtcaccaggtcgtaaaacgcaccgtaaagcaccatctgcatcatggccaagcctaaaggatcccgctccggcagcagcaaaagccgtgacggtgcggccagcatcaatgccatcaagacattcaaggacacgctccaaggaggatccgtcgatgagtgtgagttttgttgcggacctctccttttgacagcatcggttctgcagtcattgatactcgatgttccttcaaagtcatgcatcagagggacaagatcgttctcggtgacgatcacgacgaacctgcacaaccgaatggtcaagacgacgatgacatcttggccgatcgcggtcaagaagttttcagtctgaacctgcccactcgtgatgccgaagaggcgtacgatgaagcctacgacgatgcagaggaagacttggcacctgtaaaaaaaggccgaaagacgaaggtcaagcccgacgtttccaacaagggacgatatggcaaatcggattccgaggacgaggacgacgaggcggccagttcggatgacccggatgcggaatcgtggggacgatcgtactattctcgtccttccacccgacggggtcgggagatggaggaagagaacagtgacgaggaaaaggaagaggagaggatgttggaggagaaagaggtcaagcgattacagcgcaagatgaggagcgtgatcgagggtgacgaggactggggtttcgatgagcttgaagctgggccttcggtggatactggcaaggcgactgcccggtgagtcttgcttcagcaatcagacacggacgctcccgaagctgacctttcgaatgactcgacagaaccgccaattccatcctaccccctcccgaggcttcgcttcccgccgaaacgcccatcccgcaactccttacccatctgacctacaaagagcccgtcaagctcgctcttgcccgagactttcccctgatcgtcaagcggctagagaagactgaacgagggatccgaaagatgaccgaggctgaaaaggaggccgaggagggtgagggccccaatggacctctgcatcaggggctggcttggttgcattaccgtcagtattgcgttacgcacgggcgataagcaagacatccatctgacaggacttcatcacgtctgcggcacagaggtcttgctttcttacgcgaccaccctagccttttacctccacttggcctcccttccttccgataagcgacccgactttaccacccatcctatcctgccccgtcttcttcagttgaaagaagccgtcagtgctatggaagacgccgatttcgccgctgcgagcgatgacgaggacgacatgatcgagctttacgatggcgaggaagagacggatgacgagggcgaagagacccccgaggaaaaggcggcgttgaagaaggccctgaaaaagcttctgagcgggcaaggggaggatgtggattgggaagacgccgaggacacgtgggagggaggcgatctcgaggatggcgagctcgagggcttgcaagccgaagcggatgaacccctgtcggatgacgagctggaggaggaagatgaggacctggacgacgaggacctcgatctggaggatgatttggagatggatgacgaggacgacttgtcggatgaccttgagaacgaggacgtagaggagaacgagcccatggcgtcgaaatcttccaaatcaaagaaggatagcaagaagactggcaaagcagcattgctcgaggagcccgaatttgtgcccgcctcgaagagcaagcgatcaatggaccagaaatccatcttcgacgacgaggacatgggtgatctcaccgagctgtctgcgtccgagcaagccgagcgctcggcaaagaagcgatcgctgcgtttccacacttccaagatcgccgccacgtcggcccgacgagctgccgctcgggaagccaggctgcaaggagacgaggacgtgccgtacaagaatcgacaggctgcacgggacgctgctcttcagaggaacagcgcaagaggaaccgagggtgaagatctcgacgggcaggactggtctgacaaggacaagaagcgagctcgtgaagccatggatcaggatgacggggatgattattacgagacggtcaagcgtcggcgtacagatgaaaaggaagccaagcagcaggcacatgatgaagctagggaggaacagaggtgagtcgcagggatcttggtcggcttcagccttgcgcatgaactgattcatacctgcgaatatggctgtgcagacgagctctcaccgagccagagacagctgatgggcctcgttcgcttacccgggccatcgagaagaaccgtggtcttactcctcgacgggccaaggccaaccgaaaccctcgagtcaaaaagagggagagctacgagaaggccaagagaaaggtcaagtcgatgcgtgccgtctactctggaggtcagggtgctctgggtggagcgtaccagggagaaaagacgggtatctcgaccacttcaaagtcgagacgtttctagaccttgctccgccagtccaacgagacacatatttgtatatatctgcggatcaagatgtctctttatcttacgccgccgcctagcgtcgcgatatctcgttcaatacagcagtaatcaaaagcaagtcgtgttgtgccgaagaccaccgcccagtccacggggatccggactgaaagaccgggcctcggaggactcgggtgtggagggcggtccttggagcgcaaacgcgacgtctgcaataatgagaagcccttcaacttatcttgggctgatctatgagccaacgtgcccttttgccattcagatgaaccgtgttgctagtcaaggtaggctcgatgaggcgaatgcttttgttcaagaacactgtcgatgaacatcggttatcgttcctgctgttcatctgcagctcgagagaaactcacagtatcgagcgagtgctccttctcggcatcaaggcgatgaacattggtccttgccgagtcccgatcatgaaaacgaacagatcgggtcgactcgatcgaaccagcgtcctgaatagctaaacgggagcttccaagctgctgacgacctgtggaaaagtcaaatacgccacttgtagacggaaccaggatgagattcccccgcgttttccacgcgatgacctgcgtacgatcgcgtgtagatgccgttcgcagccggagcatcaatgagaccgaccgaggtgcgaacaagatggttctttgctgccgttagtcgaaggggggttcgaaaagacgtcacgcatatcgaagtcgcttcttctctgcggcaagatttcgcctccgttgaccatgcctgccaaacagtgtctcgcatagtggagctcattgacagatccgttggcctgcgcatggaagcaagggaagccgtcgaaaccctttcgataccgtgtatcgaacccccaattcgtaggcgcgtgaactgattagaaaagccgcagagcacctccacctgccctatgtatgtcgtttcggtaaagactggtatggacgcgtaaacgtgacggaggagattaatcggactgcaacaaagcctgggagatagttttgccgcaatgtggaacacagaccgaggtgcttcgcctgttccaggaccaacagcattagaaagcacgacattgcgaggctgaagcaagacatcgtcgttcaacgggcacccgagcccgtgattcgcgtggtcaggatcgtggccatttggatgtttcgcggaaggttgctcgtgcaaagccacggaaatcgtttcggtcccaatttccaaacgaaggagaagagagtgaccaaaactcttcgtctcacattggctgaccgagcccgatctccgaacaggtgttgtggcggcatcaagttcctgccattcctgtggcgcatttcggcagccccgttccgccaccaaacacatgtttgcgctaagtcacgtaaagccacgaccatacgttcgcgtgcgcaatgggccgtgcgatgtcgactacacatgtccagcccacaatgtctcggaaattcggtcgcacgtcagatatatccccgtgtgtctttcgccaaggtccggcacgccgtgtcgtttctctcaacgcgaaacgcgtctgttctgtttcgaccacagtcgtgatggcaccctcggagaaaccctgattagaagctttgctccatacaccggaattgtctgtgaaagcgatgcagcgatacgtacgatcatgctcatacaaacggtgtcatccagagcactcggatggaaggtagcaattacagagagatagagggtcctcagcatgctcgatttggtagtgccggcgggccgccggctctacacagtcggtgcggtttcaagacatgatgactctgaacgcctttgcgagtgacaacgtccattgagccaaaactcaatcttttttccggaggaaccgcataccgatcaagaaatcgccctaaagacacgaagcacatcgagtcgtaagtcgagatataaaagtcaatcgcaatgcaagtgaaatgatccgattgatattcttgttgacacttccctcgaaactcgacccaacttcgccattgcaccgatatccttaccaaccaggcctcttcctgccaccttgcatcaccaccttgaaccttgacatgcgcttctttgccctcttcacgcttttggtgaccttgatcgcagtgtcgtcctcaccggcggcaatcgctcccaatagcaagagtacagcaacgataccgcttcctgctcacaagttggataaccgagcggtccgacaaggaactctgtgtgccaatgtccccatcaaagcgcgccttaccatcttaacttatgtgagtcgccatcccacttcccctcattgtcgacttgggggctgaattcgagcatacgttcttccagactgtcatcaacgtgagaacgattctgctagaaattttgactatcgtattgctgataatgagatctcgttgcgattggactgaaccaggacatctgcctctgcattcagtacggacagctcacggacagatcgcaagaggacctgcaggcagcacttgataatatgggaactagcggtcttattggaactttactgcgagttttgggcaaaacgctggacggattatcgacgattttatttggaaacgccaataccgaggtgcgtagattcccaacttgatatgccgttcaaacgtctgactgttacctcttgaatcagcttctccgtaagagagccacctgtgactacccatccaattcggtacccgtgtgtggaggctcgtgcacattcacgtgtgcgaccggtttcaagcgctgcggcaaccaatgcatcgccgatggccgcgcctgcgtgtccaacatccccgctcccttgcgaaggcgcaagactatttgcgaaggaacgaaagtctcgtgcccagtcttcggccggggcaagacgtcattcgaatgcgtcgacatcgccaatcgtctcgagtcgtgtggaggctgcatatctgcgggacaaggccgggattgcagcgagatcgatggtgctgatcaagtctccgtaagtggttccacaacgcccgatggaaagctgggtcctcgttgatatgattgacgacgtcacagtgtcaggcgggcgactgtttagtacaaagctgcattcgtggtttcgagctcgtcaacaatgcatgcatacgaaaagcagatcttatctgaacaagctgggactagtccccaaaatgacgacattccgttttttgcattaacgaccagcttatagagagcgctagacatttgtgagattttttcccacgatattctcatgtataggttgtatgaagacatttcccatcgattatgataccgttcccaacatccccgccttttcgacccagatgtaagaaatcgttgtctccgcaagccagccggaatgaggcgagactacatactgacggcagaggtcgatcgcaatgtcgcctcaagagaaaacaagtggatctaagcacatccttgtcaacgaacgacaaaaggctcttgagcaatccacaatgagtaggtcatacgaaccccaaccaacacattctcaatgagcgccgccaattatcgattcaagatattcaattggtgggcatcagtaagcctagacttggttaccgcagtaacaagcgatggacgagctcgagacctggattggctgagagaatgaatcagcggaacccggcggacgctcgcctaggcttttttgaaggctcgttttctaggcctgcatctcgtcctgcttcatcacaccaaagattctgctctttccaatccaagtaggcctgaccagtcctgcaatcttgtggacagccctaaactgtcaagtccatcaggaccgtcttcagacaaccacacatcgggtgccgtatcccgatacaagcaatgggatccgctagtgaatcctcgttctcgacccatacgttccggccttgcgcaggtgagcgaccgttcaaagacacttcattggattgcgctagagatggtaaaaagctcgctctgaaaatacaaaaggccacgaccgcgagctctcccctctgtctcgctcattactactccttggaccgacagactcaagctccgatctgcctcgtctgacggacagcctccagaccgaggttgtcgggcacggccgtctctcccaaggggaagctcgctttgagcgcgcctccgaaagcgacatcgccgttctcggctcggaacttggcgattcgctcctcgatctctggtcggaagtttttgatgagacccctgaattcacgagcgaaccataccgatcgtaagcatgtgtggtcgattcgattggcgagacgtctcgcctcgcgaccgcgactcactggataggccaggcagcggcatctcctaaagcgcagatggtgtgaccctcgatctgcttggtgagctctacgaacgatcgtcaaccatttggcgcctcgtcagtatgcgtccctgggtgcgccttcatgcgatcgatctagactcaccctgcagcatgtcaatctcacgctcctgcgctcgtccctgtaccattcggttcatcatgttggtcatccaggtggttccctccctgcacggcgtgcactgtccacacgactcgtgcttgtagaacgcgctctgtgcaaaatgcatcgaaaacgtatcagcagactgtccactcctcgaccatcaggccttgaacctgtcgaggaggtgccactcacgaatcgagcaatggccgagatcatgtcggtcgtgttgtccatgacgatgatggcgcctgttcccaaggaagtcccgtgatccttcaacgagtcgtagtccatcaagaccttttcgctgacgtccctcgtgatgacgggcacactgcatccaccggggatgactcccttcaagttttcccaacctcctcgaacgcctccacagtgcctctcgagcatctcttgcaggggcatcgacatttcctcttcaaagacggcgggggcgttgacgtgtccagagacgcagaacaacttggtcccgtggtttcgctcccgaccaaagctggcgaaccatttacccgatcgacgagcaatggctgcgaagggaggagggggggacgaggcatgtcaactcgctatttccaacggcgtcggatgcggcgggctggcaggcttactaggggcaacggcgacggtctcaacgttggcgacggtggtagggcatccgaacaactatacgcgagcggcacacatcaacatcagcgtcgatggaccacgcctctcttgtgcaggtcgggcatgccggaactcaccccgacgtcggcggggaaaggaggcttgagtctaggctttccctgtttcccctcgatcgactcgatcagcgccgtctcttctccgcagatataagctccggcgcctcggtggagatagacatcgaaatcgtaaccggatccacaggcgttcttgccgatcagaccggccttgtaggcctcgtcgatggcttgctggacgtgagaagcttcttggtagaattctccacggatatagatgtaggctgggtaagtcatgcgaagggatgtatcagttccggggtgatctctgctatgctacgaagagcacgtgggcgggaaagcaggactcaccggcattggcgttcatcgctcgaccggcgatcaaacaaccctcgacgagcttgtgggggtctcccctcatgatctccctgtccttgcaagtacccggttcaccctcatcggcattgacgacgaggtacctaggcctgccagacatagcgtatcggacatgtcagaacgatcgtctaccccgaccgtcgatccgccaaaaaggaaaaacaactatactgacctaggatccttctcccaacctggcttgttcataaagctccatttcaacccggaggggaaccccgcaccacctcgtcctcgaagaccggaatccttgacttggttgatgatccaggtgtcacccttgaggaggatctctttggtcttgtgccagtctcctcgggactggtgggcgggcggggggcacaggtaagtggggaaagtggcgaggagatcgtgggggatcgtggtacatgggcaggcggataggggtgaggcaacagtggcgtagcatcgataacgacaggagcgagcggggtgggaaggtaatggtcgcgacagagagtagcgatcgtggcgatagcattgatatggacgagcaattgaacgaagcgacataatcagcatcgttgaagcagcgccactctcgacgacgacgacggcatggccactcacctgagctcccttgatcccatgatcgtgcctgctcaacaagttggtaaagatccgatcttgatccttcaaccctccgtatcgtcggacaggaggatcggcgacggtggccaaggatcggttcctgaggttggccgtgacggcgctcttggctgcggatccgacacaaagaggaaaagaagatggaactcatgtcagtcataggaatcagggtgacggtaccggcttgaaggagcgtgtggcggggcggatctcgagaagagtgtgtttcgatcgttcctcttctcctcggcctgagatcgatggtgggttactcacgcaagaggaccttggaagctgcgttcttgagcatcgtggggtatgtatctagatttgcgtacgtctccttttgctaggagatagcgaccgtgcagatgtcgagtagtgaacagtgttgaattgtagtggtgatgatgtcgatggagatggtgaatgttccgatcccgtcgatcccctgtggtgtcggcgtcgaggtcaaagttgagatgtttcgcgcgatcgagccaatcccgagcaaaggaattaaaaaggaaaatgagggagagtgagggtgaggggggtatttatattaacacgtcatgcctcatcgatgatacctttatttgataacagttacgtttgatgccgttattatccatctagtacactgcgagtctgacctctacaagctgaggctgagattcagaaagatccccccgactttgtaacacaagttcatggttgatgcatgatctgcctgacaagcccgtcagactctattcggatagtcgaacgcaccatcacaatctcaacattcgtacggaaacgatataggctgcagggacaagtacgccctacgttggtcagtcgagcccgttctatgcaaccgcccggcatcattttgctcatacactctattcatacctcgctcgcactcgcttttagacctgaaccatctcccgcatcgagcgcagtctgtcaacctcggctgaacggcctcgtcatctctagcaacacccggcactcgtatataaaataatcgggtgcaccccggtccttcacccccccacgatgcacctcaaaacccctcctgccaacctgatcacccaactcctcacctcatcccgggcctcgctcgcccagacatccctcccttactcttcctcttccctggggataacctcgattctcctgcggcacggtctcatctccaacatctccctcgggacacctacacgtgcggacccttcttcctttgagaccctgccgcttcccagtcgaagactatggatcgacctgaaacatcgtcaaggtcaacccgtcctccgcaacctgtcgctcgtcagtaaagcttcgaaacgggtcacggtgaccaaggaagaattgggcaggttgttgaccggacgaagggccaagaatgtcggaggagtagggttgggcgaggtcttgatcatacgggacgtcgaggggcagaacgggtacttggaagggtgggaagcgtggagaaaggggatcggcggcgaggtcgtctgtagggctggataggcggtgcgactcgcgggatcgagcgacggcagagaaaagatcgggaggtgccgttgtatactataataccgacaaacgttgggggggggggacaatcgccatcgatctatcgacatgagcatgccgatagccgacgacgagctgaacaacccgactcctggttcggcgtcgtccagagccggagaagaccacaagtgacgaggttcctaccctggcgatccaccgtggcaaaactcgaagacgcccaccgaacataacctctcctcttgaaacagcttaggagtccgttctttccatgcatcgtcggcttgatcatgccgatcgcgaacggcgtcactctacaataccaggtctatacaattgggagccggcaatgccgataaatgtacaacgtttcccttctgcaatctattcgctcgtgttgctcgctaggccagcatcgagctcttgccctgcgcccggactttccgcagaaactctagttcttcttgatcggcgtttgcctggtagagggtcaagctcgagtcagtcgggcttcttctcggcttgaacggcagtacaatcgcaactcgcctctaacagttcttgctcgagatcatgcaccctcgtctgtgcgctctcgactttttgcctcaacgtttcaatctcgctcagcaggaacgtcggcttcatggtcgtactggtctcgccttccccagtcacaccagccttcttacgcaattgcgcgttctcgaacgagatctcgctcaatttggttttgagcgagctgtaagccggcggcaagccagtgagaaacatcccgtaatatctggcgatcactttgcccttacccaacttgatcgacgagatgatcgtgctcttcttgcatggccttggtatggtgttgcatctgcgacccgagagatgttagcgaattctgagatggcgtccggacagcacagacggcctacctgtacaaaggcgctcgtcattgtttggatggcatttttatggttctgtagctccttgatgtcatcgtccctgtatatcgagctctggttcagaatctggcggtgttggaaagtctctgcccggataccggactcaccacaaaagctgattctcctcgaacctgtcgatctgcttttcgtaatcgccaatcttcttaatcttgggttcggcctcgcgtagcctgttgtccagcttgaaagatctagcggcagcgttcaattcgtcagcggaaatacaaaaggaggggggaataggagactgatgtctacttttccttttccttgatcaattcggtctttagatgagtaatcagactctgaagagataatcctattgcttcagtatcgaagatcgatcggcggtgacaaggataggggcaaacgatacgcacctctcggtccaagatctcgtcgtttctggctccctgtttctgggagacctgcttcttcaactctctattctcggccattttggcgcttaaccgggccttttcctcgctcgacgatttccgtgtccgggccaattcatccttgacactctgcaactcccggttcttctgctcggtcagacgttcctggtccttgatgtggttgtactaaatgttggcaaaggtcggggtcagatgaagttatcgcggcgttcgcactatgacccgtcgacttgccaggttttgctgttccgcctctccggacctagccgagacggccgattggtacagccggttgacatctagtgaaggtcgcagcaagtcagtggccatggatgacgtctcgtctttccgtactagctcacgttgcaagtacatccccgccagctttttctggtgaccaagctcgagcgtcaatacatccacttgctttctcaaccgctccgtctcgccctcattactcgacccgatccccagcccgccagtctggcgaatggcaatcggatgagccgtagcgtacgcattgacgcccgacctcccggcgatggacatggccatcaacggattagtccccgtgacgggcaaagccaattcagaggacctcctgtgccggaccgcttggaccgagcgatttgtaggagaaccagaagtcaccgacgtggatcccgaggtgaggtctgtcatctcggtcatcgacctcggggggagttgcggacgctgttctaggtgttcaggaccggtctctaccagtccttgagcgggaacgatggccaacaagctgcccgcgagaccgacgagctcgtccgcgtccgtctttccaaacttgttttggacggcttcgagctcagtcttggcggtccctgtgagcaaggccgggttgaacatgaaagacttcatgtatggctacgatgttccgtagagcagaagtttcagctttgtctaccaaccaaagaaatcagtccgtatgggatgctaccaaggcttaccgagatcagcctggccatctcgccttgtttccagacatccttccaccctcctacactgaacgggcaaccgaacgccttgtctcccaagtacccagctggatcccctacgaactggaccaagttcaaggggaacgctgtatacagcaacgagaggtattccgagagtatcgagctcgcgtacgcttggccactcgatatccccggtccagttgcagacacgaatggcggatttccggcggattgggtcttcgagtgaccctgatggtgctgcctggaggaatgatgttgctgttgctggtgatgatgatggtgatagagctcaaagatctcttgcgcctcgtccgacccgtgcattcccgtcgtaggatcatgatacaccttccaccccgatccagaagcgggttgcaagacattcttgtacgggtccgaccggttcatgtgatgcatgaaagttgggggtgagagggataatcccatgatcttgtcctcgttttccgaggtggccgagacggtatccatcgaccgggccgtcattacgtcgctctttgcctggtttccatttgcaccttcattcccatttcctcctgttgcacccaaaacgaaccctaatcctagtcctgatgcgccattgtcctgtcccggctcgtcaccgaggggaagatccttcatcccacgcaggggggacaacaagatccctccaacgcccgaggaactcctccgcctcctctgctccgcgccggcttgtgggacgaagaaggcgtcgttcttcccccctcttatggattgggatgacaaggccgctttaccgagtatggccagcaggtcggcgagtttgacgctgaacgggacgatactaccagggaggacgatgttaagcaaacgaagaccttgttcgaggatccgggtagaggggtctaggagcagtgaagttgtgagagtcgagaagaaggaacaagtcgggaagagggaagcgtgttcggggcgagcgagaaagagatgcgagaggaagggcaggatatgtagacggatggagggggaaggtacgtagagcacattgacatggtcaaggatggcctgcagatggtaacgaagcatgtcttgcagattcagatctagcgactggaaaggtgacatgagagctcataggacccacattgacatcgtcggcagtcagatcggacaacttggtatccaaacacttgtcctctagaccttcatttgggatcacctgggcctcgaggagagacctcggcgtaggctccggatgaccggacattgacggtgggcagagaaaggttgcccagacgagagaatgctgtagtagttacttgttcttgctacctggttgtagcgttctagtgtccattatatcatccatatcatccctatcaaccatatcatcatcatcatcatcatcatcatcatcatcatatgcccgaggttgatgtcgaacgaatgtcacgtgatcaacatccaggaaagtgttggaatctcatcatcatctacctacctacaactcttcttgtacttgatattcatcctctatgatgcagcccaggtcgaaactcgacggtcaaattcaacggtcattcgagttagggatacaatggctctcagccaggcgactcagccgctgcgctctcgatcgacgcaagcgatcgcgaggtgcactccatttacatcatcgtgttttcttcaccttgtccgaccaggtcaacgagcttcttcgtcttcgacatcggcagctttgggcaacgaacaagtcgtacataatgggaagtcggcaggaatctcaagcggagccggcgaacaagatgcccgtcccgtgtcggctacgggaagacgattgaccaaggcccagcagcaaatgttggcaaacgcggcgctgctcgcacgggccatcgattcggggtcatcatccacggctacggtggacggacctttgaccgcagacgtaccaacaggagagaagaccgtggatgttacttccccacttccatcgcccacaggagacaggacgaccgactttctcgccctgatcaccgcctcgaccgcaccccctccacaaccgaacatatctccggacctccggaccctgctcacctgccgtcccacccgagctcctcggccgcatcacagacagtacgaatgggattacaacggtcatttcgaaaagctcaatcgggcattcttgagggaacagctcgtctcgatgtacgaagagctacgcatcgaggaggccaaggtgttgagcgggatgaacgccgatttcgtagcgggccaagagaccaccgggttgcccatcctcaaaagaagcgccaagaagaaagagatcatcgagtccatcttgagggaatggggatggccgacgatgaaagaggtcagaaaggaaaagaagataagggaagagaacaagaggacggtgaataaacgtaagtcaggtacggatgagagctaacgagttgtccataggcggaaattgatcaaatgatgtgacaatagctttccctctctcccctgctgagcattactttttgcgtcgaggtcagtacggacggatggacggttacgaaagtatcatcgactgataatctcatctgtgtcacagaacccggtttcatccgcgaccttgccgccagaaatatgttacacctcacgatggaccgggtacctccctccgaggtctcttctacctcgtcagattcggtcccgtcgccgacgcaaacttccgaccaaacttacgagacgcgacttgtcatcaagggccgagcgttcgacgtcgaacagtttgaagcggccgtcaagcgcaagtttagcaagttgaacgaacagaccctggccggcgaggtgtttggaccgggattggagcaattgtacgagaccgtctcggtcatgtcgaatgcgtttgtcgagcggaccgagggtggtaatgtgagtctcttctcttcctgttggcgagtgcgagtcaatttgccgagacgaaccccattgaacgcttcggtctggttactacgctatagatcaagatcagttgcgtgaacacggctgatcgagaccgcgcggttgagctgcttagagcggccaagagacttctcgcgacgacggaaccgacttcacgagcagagattgtcgctctgcgtccatcatcgttagatcaatcgcacgccatgtacccatacctccctcctaccgcctacgtaccttctgcgctgagcgcttcgagcatcgtagcaaagacagaggtcggctcggactggttcctcgcgggccaaagctggttccgtatacgtcaggtgggagggtggtttcagaagcctagtaaagaaacgacgtcggatgggatcgtgacgatgagtgggaaagtcgatgcggaaacgttggaagcgttcggccgtggggatcaaccggattgggtcaagctggtcagcacggtagagtgagtcgctccactcgccaaggtccgtacgatccacgcttatcatgaccgcactttgactgttgcaggtatggacagcttatcttctcgtcaggtgatgctgggaacacgacgtggactcctcccattgccggagaaaagaccttgcaagagctgagagaggaaatcggagcaacgtcgctatcgaccgtgtttcttcctggatccgtctcgcctctgcacgaggtggacgctatcgctcggccgccatcgaagcgaattcgtctcaggtacgaggaaaaggcgggacaatcggagaacgactggaagccgttcctcgaggtcgaggtcgaatcactcgaatcgtctgctgctggtgccaccggagaagggcaagaggtcacgatacgcggatccacaggccgagagcaagtgcaatattgccttcgacccgccaggtgagtgggcgcagcaatcgcatgcggatttccaccaagctcacaccatcatctcgtcgctagcgataccgatatgcggattcgcaggcgattcgacaaggtcctttcgttgcaggagctaccggatgttgtcagaggcttcctgaagaccgcatcgttcagccccgctaacgcatcgtaagtgagggtgggagatcagtgaacattgcctcgtgctgagtcgacctttcccatagatccgttatcccccctcaggaggtcacgttcgatgggaagaccttccatctgcgatccgctactcatatcgatgcgtaccaagatctggatggtactgagcggcaggttccgctttttgaaaacccgaccgatttctctacggggatcaaaggctctcgcatggaggagaaagttggtcccggatctcaccaggcctatcgatgccaaacggctgactattatgcttccatcctccagatcgtcggggtgcagattgctgaccttcacaaacacatataaggggattggtataccgtcgtctttacaacattattgtcacattgtcacatgcatagggcgagcgcccacaatatacacaccatgcgattcgtttcgctcatccgtcttctaccagcggaaccccgtcttctcttcctcatcgtcctcatcattgtcgactctcccgtaccggggcatagcatcatcaaccatgccataaacagcttctactcgccgtcgccgcagcaactcagcttctgaaagccctcctttggcatgatcagcactagcgggactgatggttctgggcttcggtcctgtggtagttactactctaggtgcttcggccttcttctgcgtaaagaaagcgtacgagcctcgagcctgtcttgacggcttgatcgtgtcgaaacgagagtcgtccaagaaccccggaggcgtgatcggctcaccaaggctatcgccccagtcaaacgaccgcgcttgagtctccgccgtcgagaatcgctgacggtcgactaagcgagcattcgatgtaccgttggctgtcacgctggcttgacgtgtgcgcttggtcgagaatgacagcatatcatcctcctcgtcatcaatcgctgtgtcagcgactagcgtcgcgccgagatccgccgaaccaagtggtctttcgggcgaagtttctttatattcagaagccttgactaagctgaaacttctcttcggtggcgctgcctgttcattccctgcgacactcgcttcccgatcctcagctgccttagcgaaggtctcgtcaatccagtcggcgatatccagaagtaccggctcgacatcatgcttcatgacggacaacatttgcatctgaatatcatgatgcacggttcagttttggcgtgatgagggcaacccaatggtttaactcacgaaaccgtgcccccagccctcaatgattcgcatgctgagccagtcatcctcatcttcctgcaagatgggatcgtcgttccggttatgagaatcggtccgactcatgcgtagaccagctcgagcctgtgcgattttctgagcagcctttcgtcgcgcttcctctcgtttgttccgcttggcctgccgcaatctgcccgctaggatgacagtgtcatctacgaagggatctcgttcgccgcagataagataagtacgaggaaattgtgctagtaggacctcaggcgtaagaatagggctgatgtaatagtcggtggcgaaatctgggttgtgcctgggtccgatatacagaatcgccatcgcacgcatctaccgtaagatctagggagttagcgaatcttgctgtagacttttctctatcaaacgcaccatagtgggactgatgattcggtcctggaaataacctgtcctggatgtcattgttagtctggttccgagagtcatcttctcatggtccttctcctcctgagcttccgcagcggcaacttgcaattcgtgctgcaaagcctctaatgagatctcctcgatcggcgtcctgaccctctcgcgaagcgttttgtcttcttctctccgttcgttcacatcgccaaagacgctacgggtagacgtcgatgatctgaaacggccgctgagtgaccggtgccaactagacttcctcgacaagggatctgtctccgttgggggctttctcttgcccgagtcatcgaccacactaagtggactcttgtgacgcatgtgatctttgccttccatgatacccggaatatttcgggaggactgttcggttctaagcacctggagatcttgaggggtcatccagctgttataattgaaatcgatggctgggtaggcaagcacaagcgccaatgggtgggctatcttcagtggcgactccagaatattgagcatgatcgtagtgcagatatttccgcctctgaggcatcgatgtagcaagctgtcagcgaccatttcatctaatggactagcctggcagctcacgctgaatccccgctcaatatcatgtcaagacggccactctttatcccgagcatcgagcctttcgtctcgatcagcgtctgatatacatcgaagccttcctctatggcccacgggaaaggatctgtcatatacagatgagcatcaagtaaacaaggagcgacatttcacactcacattcgggtgctttgccataatcgatggccaagaccggcttcccagtcctcttcgtccatcgtctgagcctttcttcgtgatgctcgggccccatggcgacgaacccgccgccagggaaatccaaaatcagctcggtacagtctcgtagctcttcctccgtcttggaaaagaacagcatagccgagatcggtctagtgtgcttcgatcctttcggtcgaggaagtagaatcttccgaacaaggggtaggcgtggcctatcaaagtaggtgaacagtcgcaacttttgcacgaccaggtatctagattagcgccatttcctaccggccttgttattcgagctcacgtatggattgcttgtcttctcccatgtcactctcaacatctccaccgtacacaatgacctgaatcttctcagctatataacaccgcatgagttttgtcatctcgttggactataacgctcaggactgcgaaactcactttctcgtccgcctctcttgcccataccatgtagtaacccgcgaagagcacactgcatatatctcgtagccatttcggtttgatcggcatggctgtcgcaaagcccgcatcgaacgaggtagcgatgtacgtcgctctgtagtatgctcgcgagtactgcggatgatcgggattagcgggaacagacggcaacttgtcgtctgagcgttgctcaccatccgggcaagaggttccggagctgtcataggcatacggagtgtcgaatcagggtcacatgtaggatctagtcgataatactggttgactcacagcccaaaccaaccaagacgtccaagttacggatagcgtacatgagcgtcagagtgccgacgaccagctgatacggtgaaaaacgctctatcgtaatagtgatccgatataaacaggaggaccttggtcgacatggatcgacctggacgcttactgagcttgcggttgatgaggcccataatgcctaaaaacccgcctctcctgcccacccagccactcccaaagagctctcccacgaccctagctctggtcttgctcttccgcttgagatctccgacataaagtctccaagaccagaatatgatgacgagaaagacctgagcccgtttgaaagccggtgaaggctttcctaagatatgatcgatcatgctgaccgatggcgcttcgatgtcgcgtccgtacaaccgggatgagaatccttattatgatggacgaggggatcgtttctgactagacgacacaaaaatcgtgggtcatctagtgtgaccttcgatcttgttcaccgccgctccaggagctacgatgggacgaccgcctgccagtagatcctttcagctggttcgaggaggcgtaagctgatttcgtccacagctgtgcctagggtgatgagcttggccgattagatccgttaatgtctaattgatactgtgcgggaaaccttcggcgtatgttgcccggtgtgctggcctcttacttaacaactcacgacctgcacagtatgtcgtcaacggattgactaacttgcgtttagttgcaagcttgcaagccgatctgaagtcgagtacggtaaaagggcgtggacagtcagccggtacgaaagcggggtccccgaggtgaaccacccatcgtctatttgcatccgaacgatcacagcgtcgcgagatagataagatacgagtcaatgcgaaggcgaggtggtcgaaccgcagagcaaatccaaccacaaaaggttcaaagagaaaccgaattaatcaataatatgccgtcaagatataatacaatgttgagcaaaatcagatagcctcgagcattgctccttttgggggttgtggcgtctaatgcatccatggccaaggttcgcctactcatccttcaagaattggacgtacgccctgcgaaggaaaaagaaagaaacccggtttctcggtcagacactgttccttgtattgacggacgcggaagacgtacagattgttcgtctcctcgacaaaggggtatccaagctgctgtacaaacatgtcccactcctcgcttgcctcaggaggtactggcacggcaacaaggactcgagcgacatctgtttggtatcgatcagcttcgctcctggtatcattaagccatagcaactgacctgatccgtgatttcggtagtggaacatcgagatggtccaatcgctagccattccgtgcaagaacttcctcaaagcgcccggtcgttcagggaattctgttgcaacaaaggtttccggtgctcagtcaggggctgccgatgccatccgtcagagcgtggcaacttaccgaacctaaagacacgctcgtaaggcacctgcctccttccaccgaccatatgtctgacgtggcttttagcgaattcgtcatcgctgaggtcgactgcagtcatgccttctttctccaaggcggcgacgatctctccaacttccttggctcgagcttccggcgagatggaagcagacgagggagatgagttgaggaggaacgaggtgatgatatgggcttcgtgatcagatgagtatctgtacgaaaattcggtcgtagctcgagggtgaatgatagaatggagtttgatgaagctatcggaaacggcgaacggaatcgttcgcattggtacagactcggcacgtgttggcaccgaatatgactcacgatccaggttgttcgggcaccctgatgctcatcaagacttccctcctctcacccagttcagcacgttcggctacgaatcgcagacgaccaaagttcatgtttgcaccagaaatgacagcaacaaacttcttgcgtgcgccaaccaggttgttgcgcacgatgtgagctttgagaccggcaagggcgagagctccagcaggttcaggtacagagcgcgtttctttttacgtacaccaatctccattagcttgagcattgccaacgacgcacaatctccactcaccctcaaagacgtccttgaccgcagcacaaatttcatcgttgttgacgagggtgatttcgtccaaggtgtctttgcaaatcctgaaacactcctccccaacgatcttgacggcggtgccatcgctgaaaggtccgacttcactgagtatcactcgctttccggcagcgatactccgtttcatcgcatcaccatcgacagtctcgactccgatcactttgaggctttcgggagcgatcctcttgatgtaggcggacattccagagattaaaccaccaccaccgatgctagcaaagacaccgtcgagcttttcaaactccttcatctgtcgcgccagctcgactgcaacagttccttggccggcgatgacgaaaggatcgtcgtaagggggaatgaagtgtagcccgtgcacttttgcaagccttgcacattcggttttggcttcatcgaagtcttgcccgtgcagaacgaccttggcacccagtctctccacattcctccacttgatggaaggagtagctagaggcatgacgatggtggcaggaatcttcaagctggcaccagccagagcgactccttgagcgtggttgcctaaatgagggtgatgttaattccgtgggcctaaagacacgtgtgcacagcgacatacccgcactgcaggtgactacacccttccacttgtcttcttcaggcaagtgggccatcaagttgtaggcacctctgaccttgaaggaaaagacaggctgcaagtcctctcgtttcaaccaaatttcgttaccgagcttggccgaaaggttaacagctagagtcaaaggcgtttcctgaagattcagaggggcgctgtataccttagctgcaatagggattttgattatggttagtgacgaccaacgatattaatcaatttccgaagccaacatacacagcaagatcatgcgcaagtaatccggcgtcggctccttgccggcaccctgcgacaccaatagatgcttcggcaacctctgatagaggtgagtgggcacctctgggtcatctccgttcacggtatgagaagcggtctgagtcggcatgggtgcggaagaggaatactcgatctgcgcggctggagggaacgacgccatcttgccgttcatggatctagagtgcccattcgtcattttgggagtggcggctctctgcgctcgagcagcggcttcatcccgttccttctcttttgcttggacagcggccatctgaacattgcgaggagcgtgacgcttcgtccagccctcgaattgaacaaaggcttgctcgagcaggatgtcgacgccgaagacgtgattccaagactcagttcgctgagcgagctcgataagcgcactgactttgggtcggtaagccatttctatagctacgcctccggcttcgttcaacaaggtaggcttgagcaggataccggaggccgagggttccaaagtcatgctgccgccaggaacagtcgaaacgatcacgctgggtttggcggcaggtagatcatcaaggctggtcacgcaaacaatgttgaagtccttagggaagaacttggcaaccttctcggcgttctcccgagtacggttgaaaagatagatcgtcttgattccaagcttgtgaatggcatagactgcggcccggcaagtacctccagcaccgataaccagtccagtcgtggtctcagtcagtcgaatattagtaggcaattgcttgaaagccatggttcggatggccttccagtccgagttgtcaccgtacaggatccttgatccttcttcggtgtgcttcacagtgatggtattgacggcgccgatggcccgcgcatcgtctgaaatgctcgtcagatgcggcatgatcgagagtttgtgaggaatggtgatggaggctccgccaaagtggggatcggccaagatacgcgagatgctcagatcgacttcctcggtttcgtgcagcgcgtacttgtgaggaagacccaaggcctggaaaccagtgttatggatcgtaggcgaaagcgacgcggagatgggggttccaaagaggtagtagctcttagcaggtagacgtcccagcagatgcaaggcctgttggatctgagcaaacgtggtctgtccgggcgccgaaggattcggcagcgccggatgggtgacaggggtgagaatcgggttcatgaccctggacatctggccttgctggcccatgttgatcgcgagcaagggcttgtcagaagttttgcgggcctgtgcggcgaagacggacagcaaagtgttatcctccaactcggtcgctgttccgactagcttgacaatgtcgccaatagcgtgacattgttgatacttctgcgccatcgtcgtctcgttccatttcgctgctccagaccaatcatgccaagatgcgatgatctgggaaggacctttatgttgaacgatctcttccacccgatttttgggcatattgacctcgatatcgatgaactcgcagcccgctcggatggcaaggcgaacgaattcaaaatactcgtcaatcgcatcatctgggaagaatccaccttgagcagcggtccttactgagaagatgaccggcaggacaatatgatgcctaagcgcggccaactgcaaagcgacaaagtcgatgggcgggatggtagggtgcgttggagctgacccggtcgtggatagcaaatcgacccgtagctcaaccgcgtcaacaccgacggtgatatcatccagcacgctcaaagcgggggtcaagtcgggcagcgtcaatgccaagaaggaggtccgatggttgacgtctagctcgggagtgttgttgtcaagcccggcaagtaaccggaagaatcgagaagcttcagctcttgacccatctccagggcccgagttctcgttgccgacaagggctcccttgtaattgagatagtcgtggctcgagcactcgtagtaccaggggcgacggcgttggtaaacatccaaggcagattctccgtacgatggccgcaaagaggtatcgccaatttcaccaaggtagcgtctgatctcgtcgatctcccggaagacatggacaacgataccagaatctgccaggtaagccttcagcaagtctcggcaacccggagtctcaacgaccccgccacccaagctaatgatatagccatcaggcttctccttgatgaagtgggctaggtgctcgcgctccttttctcggaacgcaggccatccgtgggcggcaacgtattgtccgatcgggattccaacttgttccgtgaaccagtcatcggcatcgatgacgggcctgttgagcagactaccagccaaggtactgagataggtcttgccggcacctcgcataccagtaatgaagatggtagcattttcacgcaaagaacccgctaaatgagaagcatacgctccagacccggagttctggccttggtcggctaggtcgacgccctcgaattcaataccgatgattcggctcagatcgtcccaccagttaggccaagttttttcgacacagcgcttctcggtgatgacagtttggtcgactaccgtggccagaacactgaaagccatggctacccggtggtcgtcgtagcaatgaatactcgcaccctccttgagagatttgagaggagaaccaaagatgatgataccgtcatcgaactcgtcggtctggacaccgaatttacctgccaaaaggatcatgtcagcagcagcacatacgaccatgcgactcccattgacatacgcagctggtctctcatagcttgaatacggttgcactccttcacccgttggttggcgataccatagattctggtcacatttgcatcgagatctgactgtctccgtgattcgaaaggttccttagaggcgacagccgcgagcacactcgcggtgaggaacgcgtcggtcatgggctccatatcgacgctgtgcaaggcacgaagctcgccgatgggaggaccagtgaccttggtctgggtagcggtctgctccacgatacaccccatgggctcgagcacctccttagcgaatcgagcgtctccctgcaaggaggaagaaccaatgttggtcaaggtgcaagtagttccggtaattgcagcgatagccagcgggtaagtcgcactggatgcgtcagactcgacattgtagatagcagggttgacgtatgccccgttcgaaatcttgtatacgtccagcaacgctccgctagcgtctctctcccggacaacttgaacgccgaactcccgcatcatggcaatggtcatatcgatgtagagctgagaaatgacctgtcctcctgtcaactcgagagtgacgggctccctcgcgtagggtgcgcaaaggagcacagccgaaacgtattgactcgaaacgctggctgcaagcttgatgtgacctccattaagacctttgctagcgatgcgaagagggagacaaccagatccttctaggtaatcgatctcggagccattctcacggagtgcgtcgacgagcgggccgataggtcgctgcttcatccgtgcgttacctgtaacgacagtgtggtcacgatccgcttcaggctggacgagagtgcatactgcagtcaagaatcgagcagcggttccggcgtttccgaggtacacgtgcttgccgctctgaggcgggtgcatcttgccgcctccaccttgaacaacaagcgtctcaccgccatcttcccagctgaagacagcacccttcagatccgacaacgcggccatcatcacggccgtatcgtcggaatgcagaaggttgcgcatcctgcaaactcccgaaccgagagcggctagaaccagcgcacggttgctgatactcttgcttccgggcgtgctcatgacgataccctgcttatctccagtcatcgacctcggaatgcctgctcggaccctgacagcatcgcatagaaccttctcgatgatcgggttctcgatcgagcttgccttttcttcatacgtctttccgatcctgctcagcaggacaaccttgataaaggcgcccgaattcttcttgtcgaccttcatgaggttcatcaaggtagatacgctcaactttttgctgacagggagactggtgatcctggggtcgtgcagtgagacgggcagtccgtacgctttcaaggctcgggtcagtcggcctactccgacttgggaaaagacacccttttgtcgcgcaacttcggcttcgagaatcattccgaccgagacgcattctccgtgcagcatccgaggagtcaggacagcctcgatggcgtgtccgatggtgtggccaaagttgaccagatttcgcagaccagtctccctttcgtcgatcgtaacgatgtgagacttgacatagatggatccagtgacgaccgtcatgagcagtccctgagcctcggtcctagtggcagcgaatcggccggtgtgttccgctttggtactacccgattctactgcggagatgatctcgtttgcccgagattcgagcagagcgaaatcgtcgtccttccagatagctgcagtcttaacgacctcggccataccgttggcgaattctctgttgccgagagtttccaggaaagacagatcaacaaagatgaaggagggttgccagaaggctccgataaagttctttccgtgcggcgtgtccacggcggtctttcctccaacggccgagtcgaccatggctagcagcgtggtgggaatctgaacaaatttgatccctcgcatactatactcgcacggtcagccgacatccaagcggtactttttctatctcgacttactaggtggcggcgacataaccggtcaaatcccctacaactccgcctccgagagcgatcaagacggtatctcgcaaacaatggttttccagcatccagtcctcgataatctccttctgtttcctgctcttggcgccttcgccaggcgaaacctcgtagtacagcactcgtggtccaacattctcccctcgtgctaactgagccgaaagctggggatcgctcgcctggacctcagcgatctgcttttgaaactccttgacgacgtcaggcagatgcaactgtccaatgcacgtatctgtcacgatgacataggtggaggatcgaagagtccaaaggatcttgttgacaaagtaggggatgagatggactgttgcagaagcggtcagctagatggccaggagcagctgcgtgcagtctctcacgtacatccaacatggatagactctgacccaaggatggagaccttgagtagatcagggctgatggcgctcttggcgtcgaccatggtaacgtcgtgactgtcctcgatcaatttgccctaagcctagtgtttagatcgagctagactttttttgggtgaagcttggagtgtgatgctcctggagatcaaacagcctcttctgcggtgttcttaaggaagcctatgttctgatctgaaatgaaggagaagaattatgactgcaaagtcattcgatctatcgatctgcagcaaaacctgaggagatcccggcggtcatttccttcggtcgagtcaagtgatggtcccaagtttcgggcgactgggattcgcgagagcgatcgcgcggaagagaaaagtcacaactggtccgagcacaagatgtcaggcaacctggatgatgaatgctcgaactcctgaaacgctcggtcgctccctcgagtccacaacgagctagtatcatggatgaccgtgaagacatgcgtgaagagctatcgtagtacaggtatcatatagctctcagtaaggatcgttacgggtgaatcaaagatcgctcgtaaattcaatgttctatcgtgttcttgttgtgacgcgagcctttgctctggcgctatcattcatgctgccgtcacgtcttcgcccgcttccaagtcgttcaggagactcttcatcctctcaaggttctttttgaattccactgaagcccgggctgcagaattaccgtgcgccgctgacatggaatcacctttcaaagcacctccgtcatcgagcaattcccacctgttccgttgcggtcagatttgctaggtacggtcaatatgaaacatctttgactgactctacgagttgctccctgatctcttgagccttccttcgaaaatgctcgtggatcacatcctcgactgcttggacgtgattcaatcagtgcggaaagactcacagggtcggggaagactcacacggcgcgcaaggcttgatgatttggtcgatcatggcggtattcacaaccatccttcgaatattggcgttgtaacccgcatccgccgatccctaaaaagagttcggtgttgcatgaacaatgcttcccacagtcaggactgcgcacgtcgaatgctcacaccgacaagtccctcgtaccccggctcgcatacgattggagatggtgttcccagaatcaaagcctggatactaattagaacttgcaaaacggtgcttttccccgcaatccagccgggcccgtgccaggttctagcgcgtgtgccgtatcagctactggatctgtgcgatgacgcgtcttgatcgatcgacgaacccaagcagactcaagcacacctttccatttgcatctgatccgatacgaggtgcacgcacctgtgagatttatcgcacacatacttcaccagcggttctcacataggttcgggccgaatcggtggctgaatgaattccttgtattagcccatgaaggtcgatctttaggcgatctgacataccgtcctccaaacgtcgacacgatgtgacacttcggagccacctggaaatgatcacatttcagaaatactgcggctctttgcgtcgaatttgcccaaatacttgcctggttgtaagatccggcttcaagataatctgtcagtaaggaggaaacgcaggtcctgggacgtaactcacgtagaaacaaatcgaaaatataacaaccgttctacaagaaaatagtcaataggcgagctatgacgcatgccacgatcgcacccacccaatagggggagccctccggaccaatgatcatagcctaaaatatgcagagtgatctcagtaccattatgacctagccagaagtcaccactaccgaccttgatcacatctatcctattttcgtcaactctgacacaagagaggacttccggctgtcagtaaatggagagtctactgtttttccaggagctgacctgatgaatacgctggaatcccaagcagccggcagattttgagacatagttccaatctcttttgcgatagcgagtgttcttttcgaagtaaccatcccattggtcaatccaagtatatccgcggtaaaacacgagttccattgcgtgacacccaaacaggtcttgctcatagcgcagtaatcgaaacgtgttcgattaacgaaatcaaggtctaggaaggggacatgccgtcagctgagacatcgtgggtgctacctgctatgtcgactcgactgcctcacatgctttcttatcgtcatccctgctcagatatgccttataaccgccagcttccgatcccgctgcacgccctagagccggtagttcttgtctcatgcgctcgacgaaagcttcgcctttggttgtcttcaaagcctcatcgaccgaatcagccctcttgatgatcatgtgactatcaacacccagtttcagcgctcggtgatctatctgcaggaattgcttgacaacgaatggaaccgcaccagaagctttccaaggctgctgtttcaatgtcctcgacgcctgaagctttctgcttggacttattgacaaggaccttcaagtcttccttctttggactctccgtttcttcgtccgaatactgcgccatactgagcgacttaagtgtctgggaatattgtatgacgatcctttctaagagctcccggggactagccattccttcatagcgtataatcttttcttctctgccagccttcttttccaatctgatcgacacggctcgcatgtgcgtctagcgacatgatgttagctgcaagcagggttgatgaaaagaaccgaactctgacggaccatagctagggcactagcaagaccatcatgcaaggagagaaactgaagcagacatgccaaccatcagatcgccttgtctcgttctcgatcaattgaccaatgagcatcttgccttacttgtagccattccatgagttccgtgaatactgactcgcggtgatagatgtcggtgatgctatctgactgcagtagcgaacatgcgatttggttgaaccttctcctgaagtgactgaaaacagagctgtgcatcatactgttcgagggcctcgatccacctttccgaaatgggtcgggaaggtagaccctgacttctcgaaggatctgttccagtttctggtctttttcctgctgagctcttccagccttttcttcgccgctacgattctctttcttatcgccggaataaccagtcccagcaccagttccaactgaagatttgatgtatacggggccgccgctagctttcttctgaggtgtagtcttgttcgacaatgatgccgatgtcgtggcttttttgccactagcctgtgtgtcctcgtccgaagattcctcgacagacctttttcgcttacggggagaaagtacgttttggcttgggttgctagcggctgtcaaaggctccagatgaatgtcttgagcatagtgaagccctaccccaatgagcacgccctaattaggccagagatatgtcagtgtagtcagccgcagccatagatcaaacttcaacaaggtacgtacctgtatgttgggacagtgtaccaatttctcacattccccggtgtttttctgatcctcggtggtggcaggcgctgatttgtttcggctgggtcggaccagctcctcacaagccaggcagtatgtagcggaacagatcggacaagctcgttgaattcggtctctcgtatgcagcaagtaattcgagaacgactcctgcattgctgatcaatacgagtgtcgaaacgaccgaggcaatctgtgacgtacaaatcgagcgaggaagtcaacctgttcccgcacgattgtgccgctgcaccccttgcttgtgcaattcatttcgccctcgctcagttgatgatatagttggaaaagaatgctttgctctcctgcaggtgcgaaaaggatagaattggagcatgccatttcggccgtttcctgaacatgaagtgctaacctttctcggggcaaccgctcaaccagtctcccttaagcaatatgctatacggaagctctttcttgctgtcataacctttcacgaccatagtacccgtaatggcctcttcctccacttcgacaacttcttcgacgcggtctttcgacgtcaatatgtctgcaagtacatttgataatcagggacagaggcatttctcgtagagcgacggactgcggtactgacttgcataaggatcacgggatatatgctgttcctcgaaggcgtctgttgacaattcccattagcgaacaatgcctgcgccatgattcgtcatgcctggctcaccttgcatgccaagctcataatcctggtcgtctgcgaagtcctcgttccagccgggctcttcctcgcaatcggatggcccgttgactatccccacgtcgacttctttcgtgcagaccgcctgttcgatacaagggtcaatcgagaatcaatgaacgcatatgaagcttctcacctcgggagctttttttccatcattcgcagcgtcttccagatggtcatactcaccactgaagtagcgatcctgcacaggagaccacttcgtaagcgcacacgccgggaagggctcagtacgctattagtcactgtagctgccatcacgtccccttttgccgctttaagagctgccaatgcttgagttcgatttgcaccctattcagcgaggcgatcaaatgtcatcctttgagcggcacaatgacattccggctcagaagactcacgagctcaagcagactggtgatacttgcttcgatcatctcgatgcagtgtgttggttgccggagggtccaattctgaggccccgtttttgcgactcgctgttccgactgtttctgatgagtgttctcaactagtagtgctggcgcagaccttacccaccctcagacgtatcgagtacgcaacaccaatgctcgtctcgagtcaccgagggctatctgatccaatatcttacgtggagagcgcatatacacgatttacgggccgatgaaaaagtgattggtgtcatgatgcgtgatgagatactgatggatgggtagctgtgtcgagcgattgaatcatcaagaagttcgagcctcggtcttcttcgaatccggaggcaaatgtcggaacctaatgcgctcggatgcaaatcagatccactcgtcctgtacatgcgccacaacacgcaatgcgctccattccattcgtgcgatgactgtgcgcccttccatacaagactcaagcaggggacatgtcctcatcatcagtgtaggcctcatcgtcctcattctctcctaaccacttgtccatctcctcacaagctaacatgaactccttcgccttgcgctgccaaactgggtcttgcggatcgaccttcccaggcagggaaatgacgagcgaatggaacagtttgtgagcgagctggcgcatctggaacttggatcgctcgtctgggtggaagtcgcagttgaaatccgtcatcctactcgtcagttccattgcctgtagaaaaacagccaagacatctgtcagcaccatagagtccgcatggtttcgttgacttaccctgtcaaccagttcctcttgagtcggcgtcggtaaagctgcaatcctttcctcgtacagctttttctcttcctctttcagagactcttttggaacaacgccttcgacatccatcggtccgctattggctttcaggacagttgccaaggcgttcatagtggaattgacggacatgacaaggttgtttccagctttgttcagaaaacctttcagatatcgcgagggcgagtcgctgacggtactcagcttatctctttatataaacccacgcacgaatgaggtcgatcagaacatcagctttcctttgtccataaaggggtctgggaggggttaaagaaaacaatgatgcattgcaacaagttgatcgcgtttcaacggatattcgagcgggagtgtcaagttctcgaaagacaagcttcgacgcatcaagtctttgcaggactatcgctcgctgaaacccatatttgccataccgcgtgctcagcgatgtatcgttgtggcgggaaatacacagtgccttgatcccgactaagcggtagcaatcagtcttataataccggcagcgccgaggcggtatccacgttggtgctccgtatcatccatgctgggtcgaggctgagacttgaaacgcttagtcctataaataagtggctgaagttgtcggaaatgtgggattctgtcaagctgtcgtttcctcgaagctcgaagacgacttagggccgtctcaaacaagttgtaagactgagttcgccgcgccgggtccgtcacgtgaaaaggtgtaggaaccttgcaattgatgccggcatcggggaacatggtgacgtgcgttgatgaatgcggggtcactacacgaactgcgtccgtcatacataacatcaccccgacgcccttcagcttgtttagttgctcgattgtcaaagactctggggcaaactcttacctcgaagttctagcaacaagaaccctctcacaaacaccaacagaatcaccttttcaagatgtccttggattcagctcaactcgacgaatacctcgcattcgcgatcgatctcggcaagaaggccggcgagatgatcaaggatggacaagctaaacggtttgccaacaagtctacgttggataccaagcagaactctatcgatgtgagtcaaatcgcggtcctcagtgaattcaacaactggaaatcctccacggctacgtttacagctggttaccgaagtcgaccaggctgttgaggccttcatcagcaatgctatcaaggagaaatacccctcgcacaagttgtaagtaagagcagcgatctgtcaacctcgctttgttcggagctaagaaaccatgatcagcatcggagaagagacctatgccgagacccacgaaatggagctgaccgacgagtggacctggatcaacgatcctatcgacggtgagtttcgcagtctgcacgtgcgtgtacagagacaagcctgaaagttgagacgcaatctgtatcgtaggtacgactaagtaagtaccagccggaacacttgcgatgtcgctcataagctgatcatgcgactcgccggtctttagctttgttcactcgaagtaagatcctgcccttcgtaacagaacatacatttgctaatcatggaaactgcatcgctttagcccgctggtgggttgttcgatcgggttggtgtacaagaagcagcctgtggttggagttatcaacatgcccttcctcaaccaacttgtaagtgatcgattggggtctggctacaaacgttcccctcggctaaacacgaagcctgaatcggtagtactcggcaaagaagggtggtggtgcctggatgaacgggaccgctcgtcttcccctcactgggactcaccaacctttaacagagctgaaggccgccatgatcgcctctgaatgtacgtctcgtcggcaagtattgcagaatatacacctcgctgaccgttgtcgaccgactgggaacgaaagggggctctgatcgtcgggaagagaccatcaagccaaagtccaattcgtttgccaagctggccgctcaggatggtgtcatggcacacgccatcagaatcaccggagcgaccacggtcactttggtccaaatcgctgccggacagctggacttgtactggtgaggcttagctgatagcagatctacgcggctacatgcctaatcgatgtttatccctctgactatagggacgctggcccatacgcttgggatgttgccgtcagtcactagaacgatgctgcgtagctcgattgtgtttgctgatatgtaccaattgacaggccggaatggtcattgttactgaagccggcggatacttcaccggaggcaaggcttctttcgagcggggaaccgacgatctcggcagcatcatgatgagtcgaagatactgctgcattcggggcgttcctgccaccgaggtgagtgttcctccgtaatatcatgaacgatgcgttctagtaagtaatgctgatcgatgccgcctgccatttcagagtgagagctcggagcaaatccagaaacgcatcgtgaaggacctctacgagggtgagttgctgcaggtcaagggtttcatatggccttgcactgaatcgtcttttgtcatgcgcagttgttgaagaatggaccaatgacacgatggaggcggagaatctgtaaagacacagtagaagtggatgcgattgcgaatgtgtatcaaacaaccggctgccatgagccgccgcaaatacagtgaatttgccatcgctggtgccatttggcagctaggtcgtccgtttcggatatggcaggcatgacgcctggaggtaggaggccgtctggtgttagatgtacctgccatatggcgcttctagatccgcagagcgtgcatgctctcatctgtcggtattgtcgttgtgcgatcgtcgtggaagctggcagcgcctcttttgtaatgatgtcgtggtgtttgtctcctatctctatagtcgcagcttcgtgagaaaaaacgctggattgatgcttgattatcttttggttggttgttagatgggtgattattcgagcctcgaggccctcggcggtatctggtagggtgtatgcgaggaagagcgaatccatccattcttgaggtgagatttctgcgattgtccaatcatcagtttcgcggtcagaacgattcaacaggtaagacgaatttaccgcctgcctccgtggtcgtcaattcttcaaaactgtcgtatatcttggaaagtgctccaatgctgacgccggccgcgtggaatccttctcgaaggtcggcttgcgcgagctgagtcgaagcgagatcgatttggccagtctggccgaacgctggatgaacgggtaacggagagccgcatcttgtgccgaatatggcaaaagcctgggcgtgataatgcaaatcccgtaaaatgcgccgagatatcgggtttatcatgaattgtagaggcgacggacggtctgtgcacgagacgatgatcagcatttggcacgatgtcatacgtcgtcgtggtacgtacctgcactaggcaatcggccggaggccgccaagatagcttcccgcatgatatcccggatcacgcctaaataccatttcatgtgagacaacaacaaccaaaagccaccttgagaaagccccggggtcagcatatatgacggaacctagatgtactactcggctcactgatatcatatgagtgttgacgaggctgcccttgcgtctcgccctttgaaccgctttctgtggagcgataggtcgatgtgaaaagctgcagagctcgtacgctttctaggatgaacagcgcattctcggcgcgctcgtccttgtttgacctgtaggtaagcgcgactcttagctttactgtatgccagcaacaagattcggttcgacaaacctgaatattccatactgaaggcgcaaaaaggaagcgacatggatcatgctcggtgatggcccttcagacagtctacacagtcgtttccaaacactgcctagaaagaggtcggcatgggctacgagacgtccctgtcagaaacgtccgataatgacaatcaggggcgagaacataccggtttggcctgtaccgaagtagaagacagctgtttgcgtaccccgctcgatatcgccattcaagattgccaaacaagcttggtcagcccgatttagatcaagggtactcctactggttggcgaagcacacttgtgagtcgcacatagtcaatacggaacaagctataagctcacgggtccgcgtctagcgtatcaatgcgtatgcgcgcttcgcccggcgctgcccaaaacaggatggttccgtcaggatgggtcgatagctcggagacagctacgtaagatagacaatcagtattgtagtgtagccgaggagatcgtcgtggaagcacgtactctcattcgtttggaacaataattcgccaagttcgagatgatccacgtccaatcggaacaactttgtgctggtacgtcccagccggcttgtccgtagttcaatgacagctaaaagcccccgctggtttccgctcagtgtcccctcgaccacggccagcctcccgttgatatcttctgttcgggtctgatgcgtgatctgtaaaatgcgtctcggattagcccgtatcaaactccaactcccgtcgaaaagacactcgcccattcggctctgccgagaccagctaaatccagctttttggcaggaagtgtcggcgaccccaagtttgcaaaagcgtcactgagcgccacattccgtttcgagatcctataagcgaccaaactagtcttgccagactgtttaccattcgaagcggaaagcgcaagcactaggccaagcggtcgctcgggatcgctggaatgatcgacctcatctgactcgctaacgaccggttctctcgaaccgttcatgtcaggacgatcttccgacggctctgtgaacatcagcccggtcagacggaatcccgagctggccagactatcttccgcagtgtccgggaaccggatcctcgggatcggccgagcgttcatagctaaagcagagatcccggtcagatcgtcaaaaacgcattcaacctgacgccctaccatcggacctacagaagacgttttcttgcagatccaatcgtacctcgaccacatccacccaatcttcttcctcgccctccttgtcactggcgcgaaacacacttctgggcgaagtcccgatccgtcgggttgtcgtgagcgctccgtcgcccgctacgcccgtcatgagatcgatcggaccgttccgacctccctgagcggaagcattgacactgccattcaggtgggtcttcctcgttgtgtcctcgccctgaaccgagtaccagacttttctaggtctatagctcctgaatccgacccagacggtctcgtctcccggtcggatatcgatcgaagcctgtcctggcaggatcaatctcgacgcggatttagtggctgttcctgatggattccgagggtctgaaataccatccaggctcaacggtggcgcagcttgggtcaggactgtcgatggggtcaacaggggacaagagagaatctccaactttgggtaactcgaaagtggattatcgtccccgtgcaagcccaacccattgttgaccaatggaagcgcatgcaacgtcgagtaaaagttgagatgatgattggcgaagagtactacgaaaccgagcggtgatgactctttgtcccgtgtgacgaccggacgaggccctctgaacggtgttcgaaagaacctgacgttcggttcctctcgctctgaaccgttcccgttcggcagaccgttcggttgcgaagagggtgcatgtccgttggtggcttggtcatcctcgagactcatcccattgacctcggtgtccaccttaagcccgcttcgaaccgtcttggcatcccattgcctcggttcgaacaaccatcgacaagtaatcgggttatagtcggtcgtccaaaacgaatggacttcatacgtatagaagaacgtcaccttcctacttgacgcggtgggccgggtatagagagctagaactcctccttgatctgatgtggcccgctcgtcctgcaagaagttgttctccggtgacgggtcgggccggttcgagccagacggaccgccggaagagcttatcgacccggtcgcagcgttcgatgcgagttgagacagccgtgacgagaggtcgtcggatagtctaggccagtataccaggaagtatcggggatcgtgtgatcgcgatatgagagtgggtcggccgtacgtgtagggcacgagcgtaataggagatggtaagggaagggggtatgaaggggaccggctcgtgcttcgaggagtagttcctttgctcgacgtctcattatacagatatttggcgaaaagagaagggtatggtcggattggtgataacggcggacagtgcaagaggacactgggagggaggacgatggacgtcctacaaaggacattgcagtgaccgtcaacttctcgtcgatatcgactggccggttagggttcgcgaacttactgcaatgatctcctgggtatgtcattctcccagcctcgagattcatctgctaacggccacccggtctggctcaacaattccaggagttcctgttcacccgaatcgacggcttgatcggccttgcgtttcctgacagcttgtccgactgacatgtttgtcgaatggccgatgtgtctgaacagagacctgatatattggctgctatcggctaccacatgatctcctcgctacctcgatctaattacggagagccaggtggattcaaccgaaattttggatacaggagatgcgtcacgattagcatataatcaccatatgccattcagagctgcacactcgtgcactcggggctctgggtccgagggccatcccgatagctcggggcgggggagatctgccgtaatttgaacttacctaatctgatttacggcatccacttgtcgtcgccctcagaaacgcgtcgcgtcgccctttcgacagccaaatgacgatcaagggacgcgagctcgagagggaaagtcgcagagcaacggtaggcacaggtgctagatgtcgaggtcgacattactcggtgtattcatcaagtacacacccagtctgttgatctagcaagaacttgcaataggcttactaaaccaaacgatccatctccatacatcatgtcgctcttcggccctactcgtaagcctgacgacctgtgttttcgcgggtccggcgctcatccgctcgctctcaccacagctcgtgtcaacgccgctcgtctggctcagtacaagtctcaaaccgtccgtctgaccggcaaggtggtccgtatggaaggtgacaccgccatcatcgaggcgagtgacggaggtcaggtaacttataggcccatattgcctcgattctgcatcggcactgaccaatgcacccttcttcaggtttcgatcaaactgcaccgggaagccaacatctcggaccccttcgtcgagatcctaggaaaagtcaacgatgacctcagtatcaaagtattcagcagtatgaacctgggatcagacctcggtacgtccctctgtcatcgtctttcactgcggcccatagcttccagcttaccagacgtctggaccagacctgggtgtggtggaaaaggtcgtccagctcgcacataccgacaaggccagtggggtcctttctgattagaccggcaagccaccttgcttctgtgtatgtacttacacaccatcgcctcctcgatccatcaaggctctcgatccctagaatggtcgccagcgctagaatgctccaatgccatgaataacgtaaacatccttgcattactagctgcagatgtgccctctgtcatgatgtcctttcctgctaccgggacatgtatctgtgtataatgcgtacaaccatgatcgtctatctcgttattcagtcttcgtcttcaattccattcgcggccgcttcgacacgtctgcatcccggaaaaaggaaatcaagaacgccaagaatcgctctccgtactcgtctggtgggacgcaagataccatatgctggaaaggacaaagggctggttcagcaccaagctgcaggctgaaacgatgggcgacgactcactcggtccttctcggtcaagctccgccagagatgttcgagctttttagtggtattgtacggtgtgaggatgtcgatcactcccagatagtagatgatgtccatcgcgtcgttggcctcgtcagtcgcccggagaccaccttcgtcttgatagaacaagaagtgacgtcggtcggcagagtccgaggtcggcagctcggccacggcagaagtaagcgccttcgggtcggatcgcctcacagcctttcgcatagccgcagcgtccgagccacctttaatcgagctcggtttccgtcgcatcgtcgtagtgacattcggttggaacacgctcagctgaccttcgcgaatattgtccttgtttcctcgttccatattgtgaattccaatcagcagcgagtagtccatgaccccgatctgggtcaaaaagtcacgatctcgccggagctgctccccaaagagggagcgcttctccgggccaagctcaaacatccttccgcgatgcaaccagttgaggtctttcaaggttgcctttgggttggtcttggccttttcttctgggtattctctgcctagcgcagagcccttgagatcgaacgtttcgtgaatgtcgcgatgaggcgggaacaagttgttcatgatcacgaaatgaattttacgaccgcgtggcagcttgactcgatgcagaccgtagaagcgagacatgagcgtgtgaggattgttcttgatgtgggcgtggtattccttgagaatcgagcggaggtatttgtgttcggcgtggtggattgtcttgatgatgaagcggtagtcccgtgaaaaatagaagaaggatccagattttccaggtgatccgagttccgacaaaatatactttgcggtcaaagacagcagataatctgcagggtccagatggaagtaatcttcccgtaactcccggaagacccacggcgcgtagtccttgaacttgaagtcgtagcgagctgatggagtcaactcgttgccgacactagtaacggaagccattgaatcagcctaatgcccgctgtcggccaaaacgtgtaccgcttacatgtcaaaggaatacttgtgctttgcggtgaaatcctcagccgaaagcggtcgtttcatctttgcttgacaacgagagacctagaagaaagtaaacctttagcaagatgactcgcagcgtcgagagaaaaagacacaaatcagtgcaactcaccccgattcgaattcccgtcaacatgttgtacatcaagacataattgacgtgatcctctccaatcagattacccacaaaggccgatccaccgttcagaaccgggacctgaccttccacgggttgttgtgccgtgacggacgcgacttgctgttgcatcgatgttcgtgctggcacgctaccgtcttcgaactcgccgtaattggcaggagaagcggtttgacctcggctcggaccagcctctgcgttgatcgcgaagggtggttccggactaccgccaagaatggtggcggcgtcatctccactgcttcgcttacgttgtcgtttcgatagtctctctcgccgcagtttctcggcttcggctagaatatccggatccagagccgagccctgcaatcccggaacttcagtctgactagcccgccgcagactggccaatgaaggttgctgatcccaagaaaaggagccttgcggctgtcccatcggtgtccgtacggattgcacagcgggggcttgcatgctgcccgacgtgtttcttctctccatgcgatggccagcgtgagaggaacctgcatgttgctggctagacgatcctgccgaggcggtcgacatgaaagaggccgatgaagggtgaagcataccatccagatacaagccagtctgcgcattggcgggctgagggaaatagctgcctccagctccttgcggaacgacgcctgaagtaggtggaggcgcctgattcgccgacgcttgcgggggaggcaccgagccagtgacgattggcgcctgttccgcggcggacgggatagggggttccttcgaatccagacccatctccacctgtcgctgcgtcggtgatggaacgcgcaacatcggtccagatcccgtattagagcccgcacccgcgatcgtcgacgtagtagcagctcctgtgcgagccttggatgcagcgatcgatccagctctaatgggtcctgaccggtgactgatggcggaatatgcgcctccacttccattcgtcgctccagcagcgattctgtccagggacgatctttctgccccaaaggtagctgaggaaggcaagtgtcctgtagaattgactgactccgctcctgtgacctccattccatctatggcttgtatcgtcccgacagaaccgttacgacttcgtgccgatctaacgttctgatccaaactcatcggctcttccacaaagctccgacccgaaatagacactggtctgtccagatccccagtcgaagctcgcaatccggggtcatcgtatccctcatcgctatcagcactcgtctcgtcgtccgagtcagtatcagtatcgtcctcttcgcttgtcgaatcctcgtctcgcgcactgatcggtggtgagagcggcgcgggccccgagggtgtataatccaaatcgtcggcatccgacggcctgaacccgtgctgctccggctcggcatgaggttcttgaaacggttcgtccgccttgcgactccgccggttcttgcccaagaccctcttcacaaatccattctcttcgccattgtaatcctgacccatcttcctgccacttcccatggacccgttggagagccggcgtccctccacgacgtatccacctgtcaaccgatgcgcaccatccacttcaggatcctgggcgatgatctgtacggagtctctcccgaccttcttgatgtgaaccgtgggcaccacggcctcgctggagcgtttcgatgatgcgtaggctgctctctcgagctgagacaaggtctgatcattggccaaacgttccgtcttggagaggtgtctcttgtgagcgacaggaagaggcatagttgtgtgaccggattcgggatgcgagagtcggtgaaaggggttgatgaactcgtcggatgctggacgatcaagttggggataatgaggagatggtcagtcgctcgacgacattatcaaggtgacgtcccatatacttacgaggtctgaactgcgagtcagcgatcacagtcttctccccgtccgttggttccacatgtccattcgttcgagcggcgtgatccccgttaacctcagagtctcggccagtagcctcaacagctccattgagcagcaagccattatttcggtcttccaaaacctcttgaactgtcaaccccttgattcgtagatcctcgtcatgaatcttgtccgtctgcccggtagacatcgtgaaatcgataggtgaacccaagcctaggtcgatgtatggcgagcccgagttgggtatcgaggatccgttcagatacggtcgagattgcgaaggcggtgctgttgttattgatgtcgattcatctcggtcatgatcccatgcaaggtcaagttttccgttggaaggagcgataagaggtaaggttgtcatattagctgagaggtccgacagataccgccggaggaaggatgaattgatgaagcaggtcgagtgcgggtgagcagatcaaatctagaggttcctccgcagctaaagctgtatccgctggccgaacgctcccgcagcgaagttgaagcgtgctacgaggtcctgagatttgatccgctggtttgcacagtgaacgtttccctcgcagacgagcgaacggccgggtgacagagtttccgggggaaaaggtttcgactgcgtgcgggaaggttaggggcagcaagtgggagaaagggtatagagcgccggcgagcgtgtaaagttgaacgaccgtggtgggacttgaaatgtgcagctatttcttcctcctaggtatcatcgaaccgtgtatgcaagactctatacgagctctggaaagcgtatctttactgccagctcgatgtggaccgctcttgatacgtacggagcagcctgacgtcggtcgaccgacccaactgctgattgatcccgaacgactttgttgtgagggtcaggtagacagagagcgagagcgggaagggggggaaggatacgaaagagctgagactcttcgttcaccactgcgcaacgcgggggatgacagatcgcgtcacgccaaacaactacccatctctcatcaattcatcaacaacatccgcagtcgacttggcaccgtatcgaatcccaagacttttcatcccgtcattcgccgcagaacgtcaacaagcaacaaggtacgacgagtagagatgctcgccaagatccaggcatctgcgcatgttggtatcgtccgcgcatgggaatgcgattctggtagacagaagaagatgtctccaagctagcggtggcggcgcacgaacgtacttccgtcggatccttcgcaacctcggcagatcacttgccgaggtgatgcggcggccgtgcaacgcggaatcgcagctgaaacacatcacgtcctgtatcctcggccggcatacctcgcttcccatcgtcattgccacgctcaaagtccgaccacccgtctttacggccggtctgacacggcatggtgtcagaatcgatccgaatcccggaaacgccatacaaccatggttgcatcccgcttatagaatcttaatgcagcacagaatcaaccatatctttaagcgatcaaccccttaaatttcatctctttcgtcaacccttccatgattccctcaacctcccgtcccaccagcccacccgtccgcccaaagcctatcctaagctgctcgagagccatcgctaaggtctccctagcgaggcctagccggtccgttatgtgcactggtagagcgcgttgcttccctacctcgctcgaagaattcgtcgatggaccctgcgcatcggcttcgtcactagcgtccaaattcaagagctttcccaactcggtcaacgcgattccgagggatgggtggccgtgggggtagacttccttcatccctttccataccatcgcttgggattcgatcgcgtcaaagagatccttgacggtctccgccatcgcttggcccggcaacgcgggtataggctgggaggcgagcaagctgcgcagacgtagcataggctggaaagggtagctggagggcaggaagtattccgccaaggcgtctgtcacggatggaactttcgaagcgtgaaattcgcctagtttgcacgtcgcatcacgtcagctgtgctggcaggacggcatgcgacgtcggatatacttaccaagtagaccatgtgcatcctccagtaacagttgttcactaaattctatgagattgttcagcctctccacgtcaaccgtgtacgactctttgcaagcttcgcagcggacaggagtattcgtctttgagctcaaatctgaaccgcgtccgccagtggatgtgtttagctagctggtttgtgcaaaggctcccccacctttgcggccccaaacatacctggtactggcactggaccgccacaagcttgatggcgaagtgcccatcttgggtccaccttgcccgctttcgtaactgcacacaggttgcaaccgcagtcgaagtgatacgtctcttgtagttccttttgccgcatatggtatggcgatgcgacatcgacgtagcaagtcaccaactgttcgtttaaggcgggagggagcagttcaatgagtagcattcatgtcttggtctcttttgattgacctacctcttccccctcattgatatcccgcaaagcgaccaattcgatgcttttaccttcgttcgccgatcctccgttcggaaagaccacgaccgcgttaggctcgcatgagtgattcaaaaacgcgagtaggggagagacgaccgtcccaatcggttccagagatgaggatgccaacgtgaacgagttggagccgaactgagagatgtgactggcaaaaatgagcacttcgtaagtaaacgcagtttctgatacctacggctgtgcagagatcgagaacttctggaacatcccggaagccgtaattgctcatgtcgactggtatgagctcttcttcgttttcgcccgctcttaacggctcggcggaagacaagtattgattcaggcgtagagcgagtcgtgcgaagggttcccgctttggtgtatcaagattcgctctgtctggtgattgcagaaacatgatttcaatcgtcaagtaatcgttcagactcgaccttccacgtacgagattgcatttccgcgataggggtccactgcgtgtttgcggtcagcctcatccgtcgatccgaccctctgcaattctagatcgttggctcacatatttgccttcctctcctggaccaccttgctccctggcttttctcctgccccataccagtttgccgagcaaccggacctcgtccggaggtatccagctgggcgacccttcctcttcctcggtctccccagtcaacgagcgtaatagtcgggtttcctccgactgagctgcagtctgagttcccgtttttgccttgttcttccggcttactcggcgaagtcgtttgaacgctctgcattcctgggcatgcgaaggccaatcggctgtttgacaagcctacgaagttgcaatgagtcaacgcggtctctgtatctagaatgccgtacttcagcttacggtcgagcagtaccgggcgaccttgcagccggtacacctcttcaagcccctttcctcctcctcttggttcttcgccaaccgaacggcattcacacggctctcaaattcgtgcatcttgccctgagccacagacagctctctctcgtccagccaacatcgactgcacctggatgctagacgagatgaagaaagagctgaagctgcaggagctgtctgtatgatcgattcgcctggcgaaacgacaagggtaagattcatcaacggttagacaagcggtcaaggcgacagggtgctggaaacttacctttcctgacgctggatccggctttaacatacatcccccggccagatcgcttactcatgcgaatttctagcttgtcatcggggaaatcctggtaactcggaaggcccttgacagggactgacgcttctccgattgttgccggattcgctgtgatgatcgaagaactctcttccgagggctgcgtggtatcgaccgctgccgctgaatcagtttcttctaattgcgatgcttcgaggtccatcggggtagttttagttggctcatttgaatccgtgtagggaccagatatctggattgaagccctgtcccgcgaggcgaggggtttctgcctgctagcccgggtagccttgaggctcgcgaatgaagacatctcctgcagttgtagtgccttggatgttcagggggcaagttccatactttcgtcagctccccacaagaattaactaatttattcgtcgaaaccgttgagtgttcccttggatttctcttgtcagcgaaacttcgagaactctatccgtttgaatatgcccttgaattctgatgatgaggtgtcggctaacggaagcaaatcggaatcaaatcgctcggggccgacgtagaggatcataacccccggagcctgctcaggaatctacatttcacacacacaccgtaggattatgcttcaaattggtcgaaccctcgtccgaccagacccgtacccgtacccctacttgatatggatgaaactgccattctgatcctctgatagacataaaattgggcaagcggacgacctagagactgccaagacacaccgcgcagacacggtcgaggttggcactggaaaagccaaaggacagccaagaactagcaaccagcatttgcgtcttccgggctactgattgttgcaaggaaaatcgctacggggacacaaggcggaatatgaggccgctcatccagattccggcgtcgtacattcactatgcgcattcttccgtagccttcctcgcattcggctctgcctttgccttagcatcagctctccactacaaaaaggtcgtcaagaacgggattgctggctggcctgatgaatggttacccagtgttagcgcttcgtgagtcttcgtcgtcgtcatcctggaactatccgccctttggtcttactctgactggctcgtcttctctgtagtatcggtgactgggcccctgaacgccctatcttccaaatcatcatcgcgctctgctcgggacctcgtttcctactcatcctcgtacaatggctagtgacacgaagaaaacctcctatgatcgaaaagaagcacgactttgtcaagcagaaaggcccttctggcggagaagccggagggctacaaacggccgattggttggcgattgtcggagtgatccgcacgttctgttggtgagtactccgcttttcgactgtagccttgtcagattgacttgatagctttgattctgtctgacctagtgcgggatgggtttacgttacatcaaccgatcaccatggcgagtcggcgcgctcacactggccgacaccgcttcgaactaaacccatcacgattgaacagattttcacgacgctgcgatgatcgcatatctgctcctgacactgccctggatggttgggacgtgcttggcgactcctccctctcgtccatccacccagaagaggaggtcagtttcgtaatttaccaaaccggtctctcgcgattcaactgagcttggtttcccttgcgcagggaattcacggccatcacctttcacgcgcttctggttcccttggtatacttcttcatacaacacaaagcttacaaggtcaaaggagcctacagctattacgccattttcgaatggagtctggtcctggtcgacgtcttgttcgacgcttggggtgtgcctgaggtgaaaaaggttcagattcagatcgtcctacttgaaggaggcgaagcagcagcaggatccgataccaagatgtacgtgacttgatttaaacggcgaagtgtacatcggcatagttatatgctgaacaaaattgacttcggaattatcagtaccgtagagaacggcaatccgctcaacaagttcagcgtgacggaagggcttttaccagctcttaacatttccaaggaagacatgttgatggaatggccggcggaaagatcgggatgggcgatcccgcatgaccagttgaaagcggaaacgggattttctcgttcagtcataagcttcagtgccgatgtctacctctgtgagttgcttgctagtcctctgtctgtctttcactcacgccgttcgccaaacatagcgttatgcttttggacaatcttcactcaacttggcttacagttattctatttctcggtctgggaattaggtaagtctgcaccttaccgtcatgtcactattcatcgctgaacctacggatatgagacagctctttcgggatcagaactggctctattggccacgctctcgccatggctcttgacctacccttcgatctcgcggtttagcacatctcgcaaggggacgctcatcctccgcgcctcgtcgctggttttcgggctgggagcatacaagatgccgacgccatcgctgagactattggccgtcgtattgggcaatgtatttgcctggatggagcttgccgccacttcgaagcggctcagaggaggtatcgctgcccgaaccgaaggcagctgtgagccgcttcgtgaactgcttcattggagcgactgctgaacggacgtgtcttatacacagaccttatgctcgggctcatctgctcactcgctttgaaattggtcaacaactcggtcaaccctttctggtgtatcgttgatgaggtttcgggaggctttaacaaaaccggtatcgctctggcgtcagcagccttcgtggagaaaatgatccgtcccaacagggaccaggctcagacgcatagaccgaaccacaccaaggagacggccgaccctcaagagcctttctctacacttcaacggcaatcgatcattgctggaatcggttcccttatcttcctgactcagacgttcgtgaccgatgccggtaccatcattgcctggaattggactggttacccggtcactggtccgcggcttctctggcaggccagtgcagtcattggagctacagcactagggttgatcgctcgctggaaccaggatcaagctatgtccccccgagctcgcccctatggtcttatgagtctgggtgccacaatcctcgcttgttcgactctatgcggacactacaaagcagttttacagaacgtctcttctgaatggattgactggattcaattcagcggaggctgcgcattggtctcgttgctcgtctaccatttcccagccttttggcaggagctctctcgatacgactacgatggacgcctgctttgtcatgccctgggattcaacgctgcgttagacgtcatatcggtcatcacagtcgcatacgccttcgtaccgggaggcaacctgcttcgggagaagatgccagacgtagtcttcctgacgaccgcatgcctcttcaacgcggggttcgtctttgacaaactttcgtcagcctacaaaacgacctttgccgaagagcgagcgcaggggttgcgctctaagcgactcttagtccagggaactatggtgctcgccggattggttctcggctcagaggtattttgtcgccaaaggagggatgccatcgtcatcaaaccacatcatatcgagactggagtatggacttctggaatctggacggtccacttcggggtcgacctcgcgggcagggacagtcaaaagaggatgctcaatcttatccgtgaagccgaagtcgatgttctcggtcttttggagacggacttgcaacgatttgtctacgggaaccgagatctcacgcggatgatcagtgaagaactcggttattatgtcgacatcggcccgggaccgaacaaacatacttggggcgcagttctcttgtcaaagttccccatcctcgaatcgacgcatcatcttctgccatcgccacgaggtgaactcgcaccggcaatatcggccaagcttttaatcaataatcaagtcgtcaatgtgatcgtctcacacaatggccaagaagaagaccctgtcgaccggcaattacagaccgaggccatcgccaaaatcagcagctcctgttggcctgaccctttcgtctttttgggctacgttgtgacccgtgtgggggcgaagagaccagcgccatacgagatcctgatggcggacggacaactatgggacgttgagatagcggatcgtgataggtggtgtgaatatattgccttcaggtatctctggcgtgtagcctatgctcggatttcccacggcgacatcacggatacggagatgcaactggccaagttcgtgaccctcgattcggccctccccgtcgactaccaatcgaacgaggacctttattaccatacgtacgaaaaagccgttcccgagtcatggcagttccctcagcaattccggggtaatggtacaaggtaagtatagcgacgatggacttgcgtgaagtattcttacttgtcctctattcccatgcagaaatcacaaatatcacgtctttgatgggcctatctactacttccctccgaaacgtttctgggatcgatacaatcttacacactgggacttcgtgcagcaatcttacaattgaacgtgatataccaatgccatgttattttttgttgtctgcgtttgttgcatcggatcccttcagagtctatcttgaatcgtgacaataatgatgggttgaattagatttcgcccgacgatcatcggatttgcggatcatcgtctcaaaatcgattccatctgtctgttctcgtaagccttaccttctctcatcaggaccttgtcggtatataaactgcacataagtaacaggacaaccttcagctgactccatctactcgtttgactgaatcttcctacaccatccaattgacccaattgcaatgccacctgttcgaaccccgaaatcgcctgctaagcgcagatcgcctaagaagaaccatcagtctccggaacctgatgttgaagtgaagccaccggtactctaccagagccgaatcaccaacgacctgtaccaccagatcctcatcaagacgctcgaacatgctttgagcaagaacatggactggtacgagatgagccaagagattctggccgacgaggaggctatgagcgtcatcctgctcacgttgtcacccaagaagggcatagccaagggaaagggaaagggcaagggtaaagtgaaggaggcagagcaggacaacgaaaacgaagcgaatgagaagaaggagagcaacaaggatctgacggggaccgagttacgtgagatgcgcgctacgtccgaggtaaaaccgtcgaagaagcacgagctgactgcgaaatcgtcttgcgacagacgaccactttcataacgttcgtttcgggcgtctcaatcctaccatggacctcgtgccaaagctgattctcatcctgtcacttcccgcaggttatttttccggccttgaaatctggcgtgcctatttggctcgccactgttgaacctctaactccaaccctttccgaagagtcttccaccaagggttctcagagccccggaatgcccgagtaatcaagtggcactaagcgagaccaggctggatatgatgcgcgattcatgattgtcataagtagctctgtacgtgtttacactggttcaattgatgcgatgcaatcctccgtctctcccttcgcgaccggcacctagttgccgagagccatgttcaacaaggacgcgatctctgccttgtgcgcggtcttgcttccggtggctaccgacgaggtagggtttcgtccggcgtactcggggaccttgcccttgtggtgctgagtctgcttgagggcggtgatcaaacggggttggacgtaggtccaggcaccgttgttcaagggctgcgaggcggaagttttagtcagtaccggcgcgggggaatgactgtgctctcgaaatgtgctcacctcctcctgagcccaaacaagctcggcgttctggtacttgtcgaggtgaggggtgatctatatcaaaagcccaataagtattctagactttggatccgctcgatcgtgtcgacgtaccagatcgtaaggcaagggcgagagctgctcgaccctagagatggcaatgtccttgattcccaacctctcacgttcttgcagcaactggtagtagacttggcctgcagagtgtcgtcatagcgtcgtgagctatcaatggcatcaaacggacgatatcgtggcctgtgacttgacttaccactgcagaggatatgacgcctaatgttctcgggtgcctcgagctcggcggggtggggttcgggcaggtatcgctcaaagaccgactcgccggtcatctcttccaggttcgatcgggcaagagggtgacgcaacaagttcttggagaagaagacgatcaactgtaacgggatgatatcgagccaagtgagtctacgcctcggataccgaccaagccggcgaagcggcttacaggttttcggaactctcggagctgctgacgacgcaacacgtggaagtagttggccggagtactgatcaagatgcctttcattcagcacggctgtctcagagtcatggcacaggtaagggtcatgactcacgaggggtatacgatctgcatgttgcagtcctggtgttgacggtcgagcttctcggggggagggtagacccttgggtcgtcatcagtcaactgcaagaatcgctcgagacgaccactcgagtgctcgggaccctgtccgtcgtatccgtggggcaaggacaagaccagtccggttcgctgcaaccatttcttctctcccgaagcgatgaattggtcgatgatgcactgagcgttgttgctacaggcaggcagagatgatgaggtcagcggggagcgtcctaaggcgacaaagacgataccaaagacacgtaggacacgtacacaaagtcaccgaactgggcctcccacatggtcaacgagttgggcgagaccaacgagtaaccgagctcgaatccgagggtaccgaattcggacaagtgcgagttgcaaatggtgaagctaccctggtcgggaccgacgtgcttcagaggcttgtagaacgactcgttctcctggtcgtggaggacggcgtgtcgctgggaaaaggtacctcgctcgacgtcctgtcccgagactcgaacgtgggtgccctccaacaacatcgatccaaaggccaacgactcggcggtggcccagtcaatgttcttgccctcctcgaccgacttgccacgggtgttcaagatacgggccaagtttcggtgagggacgaacccttcgggcgtgttcgagacaaccttgccgacgtgcttgaggacatcctccttgacaccggtagggtggtggggcaaaatgttctcggccagctccttgggggtggggaagccgtcccacgaggacgagagccactctttggccgaaggcttgtatcccttgctagcatcgagagccttttcgagcatgccccagacccagtccttgtgctcagtgatctccttttcagtaaagctcttctcctctacgagctttttgcagtaaatgtcgagcgcggtgggttgttcctggatggccttgtacatcctgggctgggtgaacgagggctgatcggtctcgttgtgaccgtatcgtcggtaacagacaatgtcgatgacgacgtcctttttgaactttgccctaaagtcggcggccatggtgcagacaaagttgacggcctctacattgtcaccgttgacgtggaagatgggcgcgtcgatcgccttggcaatgtccgaggggtaaggggtcgaacgggagaatcgagggtcggtggtgaacccgatctggttgttgacgatcaagtggagcgtaccaccgatcccgtagttgggcaagtgatgcattcccatggtctcgtagacgacaccctgaccagcaaacgcggcgtctccgtggagcaagacaccgagagcggtatcgtggttctcctcgtcaccctcaaagtgctgaatggccctcgtctttcccatgacgatcgggtcctcggcctccaagtgggacgggttggcgaccaacgagagggcgacctttttacccgaaggggtgggtcgaacgtagttggcacccaagtggtacttgacgtccccaccgcccgtgtcgtccgagtcggcgttgccgctaaactcgttcaagatggcctcgatgggctttcggatgacgtttcctagcacgttcaatcgtcctcggtgaggcatacccatgacgatgctcttgacaccggcgtcgacggatcggtcgatcaaggccttcataccagggatcaaggcctcgcaaccctcgagaccgaaacgcttctcgttggggtacttggaagcgataaacttttcaaagagctcggaccacatcaatcggtcgagaatgactcgcttttcctcggtgttgtattgccattgctggggcttttcgatacgttctcggatccagtcgcattggaccttgtccgggatgtggacgtactgcacaccgatcgatcgggctgccggaagcgagacccacgtcagctgtcacgtacaccctcctcccctcctcggcgcgcgttctcgtcgactcacagtacatctttttcaagctctcgatgatatctcccagagtcatcttttcgatcccggcgtccaaaaacctaggtaagattccagggcccaagttgaactctttggtcaagtccttttccgtccatccgtagtgctcgaggtcgagctcggggaccctgctgctatcgagatcagggtcgaggattccaagagggtcgagcttggcaatgtggtgacctctgacttggtaagcacggacgagcaactggacctgggaggcgcaggaaagagtctcgggttagcatcccggtcgtcggcaaattcggtatctccttcaccaccaccacgacgatgacgacgacgacgacgacaacactcaccttcaagtgatcggtaacttcgctacctccagcaccggccatggacatgcccggggcagcatcgaccgggtgagaaccgacggcgacgtcgagtccggctcggtatgcgggaggaggggtgtaagcggccgacgagggaagaccgttgtcgagccccttgaagtaggtttgccatgagacgtgaacggattgagggtcctgcggttgggagaaaggtagggatggagagggtggaaggcgcgggacgcgggcgggggagggggatgtaacgtcagcaacggtggctagcgtttccgagaagggggggtaaagcaggagagtataaagctcacctctttccagcatcggtacatcctggttggtaaggagaacggaagaacggagatcggatcagctcgtaatgtgatggccagcaaacgcgacgctgagaaaacctactcttcgatgtaataagcgttctgaccgttggcaaacgagtccccgttcgagggagtggcatagctcctcttctgcgtctgggtttgagataaccgggcaacggcagggacggagctcctcaaggacctcgtcgaacaagctctcgagctcgagatgaccgtcgaggtgagttgacggagcatggtggaggtgtagtgtggcaagggtttgctttcttctacgaggtggaaaggagaaggggagggggaagaaggggaggtgtgtaggttgattccaccggcggtcgaaagggttgatacgacctgtggtactactgttgtcgaggtatggctttaccccgtcaggtagttgcggatttgtttgggtgcagaaatgtatgtttgatgatgtcgagacggaactgagagagagtcggtcggtcggatgttggctctctctctctctgtctctctctttcgcgtttgaaccgactaacagcgtcgacgcggcaaacagcagggcacacggcagagggaacaggggaagtggcaaatcacgtgacactaacccccgtgttcatcaattgccgattaccacatcctcggatcggtcttgctcggatctatcgcccgaaaagacagaaagaaacagaaaaaggtgaaacgaacaattacccaaacagaaaagcactccaaacgacgggatatcgtctcatgaacgggcaagtcagagcgttttgctttctcacaatgcacacaaagtacaatgacgtgccaacaaagacgggatacgacgagatactctatgccaccttgtaccttcccgcaggcgcggctcgctcgtcgttctgtagaaacaagtagatcagaaacacatcacatgagccacctcgaaccgcgtacgacccggatcgatcaagcttcccttccaaagacttaccaaggcggccacgctcgcatccaacaagatcctcctgagctcgtccacggccaacttgaccctgaactcgtcgttgctctcgatgaggaggtgcaacttgggctcttgacccggtccaggttccttgcccgtctcgtaaaagatacctgatcgaaacgcgcacatcacaccgtcagccgatcgtcccccacgaatacgctagcgcccgcctctctccagactcctcacccttgttcgtgatggaagcccccgacaattcttgcaattgcaccatctgttccttgttggtcgccttccacctcgccttttgagggtaatcgttgatgggcacgatcgcgtgaaactcggtcgcgtccgaactcttggccggttgcgccgccacgctcgccgcattcttctcggccttggtcttgttcaagctggccgtgatcctcgcgacggcggattgaaggttttccatgacgttgccacccttgcccgcagcttccgcacgttggagcgcagccaccgtctgagcgggcagcttggagacatcggcgccgagcgtagtggtggacgacggggtggcgaccgtggcttgttgcgccggtttcccaccgctcgacgaggttcccgcgccagcaccgggagccaccttgtccggagcggctcctctgacaatctcgaccttgaaatcgaacccgtaatccggggggatcgtcccggccgcaccaccatccttgccgcccttgtccttgctctccccggcagcgtccgacttcttttcgacacgcgcaccgtcttccccgtagaacgctcgttcggctcgatccttgctctctcgctcggcttcaaacttgtcgagaccttttcctccaaacccggagccagccaccttggctttaccttcacgaaccttggtgagaaagtctgttggcggacgtgatatggtcagcaggtttatgtggaaaggggcgggtacatgggacgccctctcggcctgggaactcaccttccgacagtttctccagctcgggcgggacattcgcctcgctcgccttgagcgcacgtacgatatcgaccgagtatcgatcctgatccgattggataaacgtgatacacgtaccagagtttcccgcccgtcccgttcggcccgctcgatggacatagtcttccatgtggttcgggcaatcataattgatgaccagtttgagctccttgacatccaatccacgagcggcgaccgaggtggcgatgacgatgggaatgtacccggctttgaaatccgagatggcttgatcacggtcgacctggtctttcccaccgtgcaacgaggtgcagatgtaacccttgcgcatcagctcgcggaacagctcgtcggcagattcctgacgctcgacaaagatcaacgtccggaaatcctcctcgtccttgtgctgctcgcccatctctcccaggatctcgagcaagcgcaggaacttttggtcggcgtcccggatttcgacgcgctgagtaatctctttggcgacgacggaacgacctccgaccgtaatctccaacggtttgatcaggatctttctcgccaacgcgtccatcttggcggggaaagtggccgagaacaagagcgtctgtcggtccggtcgaatgttgttgacaatcttcatgacctgcggttcgaatcccatgtcgaacattcgatcggcctcgtccagaacgaggtaggtgcaacgcctcaggttggtaacacggcccgaattggccgtgaggaggtcgatcattcggccaggggtgcagacgacgacttcggctcccttcttcatatcaccaatctgctcggacaatggcgctccaccataggcacacacggctcgcatgttgagcgccgtcaggaagggcttgctttctctccagatttgagtggcgagctctcgcgtcggcgtcatgatcagcgccaacggtccttctcccgtctccagtggtctctgatccttgatatgtcggaataagggcagtaggaacgcgatcgttttgcccgaacccgtcttggccactccgatcatgtccctgccagacatgatggctgggatcgcctgagcttgaatggacgtcggggccgtgtacccgagcttcttgatgacatcgtaacaacccgcaggcagaccgaaagctccccaatttcgcacgggacgggggcaatccgctcctcgaatcttgatcccgtccatctcgatcctcatcagctcgacatcctcctcgtccatatcgttcgtctcctggttaggaacgtaaaactttttcctgaacggctcgtaagcaatcttgccgtgctgagcgacaggcagatccttcttcttggccttctttgcagcgagcgcgagaatgtcttcggccgtcatgggtccgtcccgttgaggttcctcgtcttcgccaacgtcgtcgtcctcgttcaacacctcggctcgaggacccgaagtgaccggtccgccaaacttcttttcgtcctccttgttgacctttttgacctccttcgtgttctccttcatgaacgcgtccaacggatcttcctcttcttcctcatcgacgtccatcttgtcggatgtgactttcgacgccaaagggggagcgggtgccgaatcgtcctcgtcgtcgctgacgacgtccaggttttcggaaaccatctcgtccggcgccagtccaccgggagcgaccagtggatcgacgggcggcaggttcagcttttgcagcttgcgatcagaggcgtccgagtcgtccatgaccagaccgccagtgggcttggctgggaggcccgccttgatgggtagaccgatgcgggacagggtggcggaaggaagggaaaaggtcggctttgcaggaaggccggctacaaagacaagcagaaagagcgggaagaggtagggaatcgtagatcatgtgtttagcatcgagtggctacattgacagacccgtctgtcaacactcactggcaggtttgacccctccgagcttgtttcctatggaggcggccgcattggctgcaccagcgatgctgccactgatagccttgccgacctctgcagcagcagctttcgccgcctgagctttcctccaagcctctaatcgctcggctttgcgacgcttcttctcctcttcggctgacaagggtgtgccatcaggtggaggaggtggcgcagaggacgaagcgggtgcgggggagtcgttcctgcttgccacgaacggcgagccaggggtagtaccgggattggcgagcaaggacgcggcagagggagaagcggcgccgttcgtgaatccacggttgtcgatcgatgcgggatggagagcaggattcgctttgtgaacagggctgtccgtcgtctccgggcctcgactgcgatcccttaccctggtccctcgatcacgatcgtccctcggcttttctctttccctatcgcggtcgccacgacctgcatctctcgaataccggtcgtcgtcgttgcgtcgactaccccgatctcgatcccgctcgtcataccggctcgaccggtacctgtcgtcctcgtatctcgaccgatcgcttctcttcctgtccttcgcgtaatcgtcgtcccgctctcgatacttcttgtctcccctgtgtctatcttcataatctcggtcgtaatccttggtgctacgacgtctgtcgtcatcgtaccggtctcgttcccgtcgaccggaactcgaacctccagcaggcgaaggtgagcggtcccggcgggaagagccggtgccttcatacgagacgcgggatcgcttcggatcgggcagtcgatcttctcttgatattgaccgaggcatgttgttggtcgttgtcacaggctttcgaaccttgttggggatgtttaaaggcttgttgaaggggtatagatgtgttgtatagggtagtagttcatagagtgtactctggttgctggttgctaggtggccacgcgccaagtgacgattcgcgcttttaatttgactcgagatcaaacagaattagctagcgttaactgactaatagcagatagcagatctaacaatcaccacccaagttggtcctctactatcataactactctagctactctacctcgcatcattcttgacctagatcacgacgctcatctcgaccgtcacctggatattcaacgttttcgacgccatgtccttccgtacttccgctcgcactttcgccccaatcttcaagcaaacactccgttctcaaccctttgcctccacctcaaggatagccgctcgaccgatcctcccgctggcggcatcctcctcatctggatcgttaccatacgcccagctagcccggaggttcaagtctacatcgacggcggctgagacgagcgccgaagaggggacctctaccaacttgaagttcgttgacgagaacgggaacccattacggatcgagccaaaactgcgagtcatcttcgcaaccttatgccatggcccggtcggtcgtgctgaacttttgcatccttcgtctcctgcttgcactcgatccgatacagttctctgacttttacgtgctcggtggataaatgcggagagaggtcgacccatgaattcgctaagcggagttacacccggggtatcgtcatcgttcaatgtcccggctgcaagaaccggtacgtccggctactcccgttcccgtgcaacatgtctctactcacttctgatcgcttcgtaccccgacgtcgcaggcatctgatagcagaccatctaggctggttcaaggaagtgaccgccgagggacaacatcgaacgatcgaagacttgatgaaagccaagggggaaaaggttacccgtggaaaagtcgggcaagacggggatatcgagatcatcgattgatcgaccatgggacatatagtctgggataggggaacccttgtagcaaacactagaggacacgagaacgtccagaagcatttgtatccattaccactcagcatacctttcgttatccctggctcggtcaatattgtcatggaagctcctggcacggtaatgccactctagccgtagctgtccagagctagggcctggaacctggttcaagttcttccactgacgctgccgtggagcgagtggaaggaagccccagtggactggatagcagtgctgtcacctcgcaggctacgtctacataggaggatgaagccagcaaggacgacgcaagccgtctcatcacatggtgcgaatcccagctgcactttcttaaggatgaccagcggccaaccagtgcgtacaaccagcagccaaggttatatgtatggacactggttggcaccgcttttcaacatatgccacaggttctcccacagttcctgataaaagggaacaagggccaatcacaataacaacgagaacgtgtacctcgctaacgaacgattcgagacgatgttttttcacgtaggtaccgcctggggggcgtcttcaccattattggtatctcgcatcgagcacaacccattgtactagttcatttgcttgtacgaaccggacacgcggatgtcttgtttcaggacggtaaccatacggcgttcactaagccgagccagctgtacagactggcacattgctactttactgctcatcaaaagtggatgtaccagcccacggtccccagcaggcgagacgctcgctaagctcgagtgtgacggataccgatcatcggcattcgcgatggtgcggtctggcgcaacgcgtgcggaaacatcatcgagcagagtaatgaatgcattattggttattatcggtatgctggtttccaggtcgtgaggagcactgtagtagtaccgcgacaacccgatttgggtcctcccatcgccatgctacattcatacggtctcgtggtgggtacctgtcgcactgttctagtgtggaaggagaaggcatggggcttacctgatggttccgcaggagccctgtctgcgatctagtccccccaagagcggatctgcttagacagataatccaaagcagctcgcctcaagaggccctgcaggtagctacgacctcgtcgagcacaaccagcaatctttgtgtgtcgctttgctccacgataaatcataatgcttcgcgatcacgcacttgtgcccccatgagggatgatgaccgcttcctggtctgcctgcctgtgtcctttctcttagacagtgtcatgagtggctgttcaggttgatttgaccaatcgtctccagcattacgcataatgatgcagcagccatgatcaatgaggcttgtgtatggtttgattaggtgcctgtttacaaacgtagacggtcgacattttgagcgtgatttgttggtggtcctggctgaaattaagacttgatccaaacactgagggcaccaagattctactaggcctaatacttttttggttctagctcgttgtccagcgagattggtcgagattagcgtgcacgcacgtctcagcttagtgctgcacaggtactagccggaacagagtgctaaccagttgctcggatttagaaacggcgcaatgtctggccgtctcctgtacgatcatacgtctgagctactctaccttcgatagacaaggccaatcagccaagatacacttgaaccaataactcgtccgcgattgcaagcatagcgctcaagtcagaagattggaggcctcgtgtccccgagggctttcagtctttcagacggtcttatggctcaagcgctttcagcttgaggagttataatacaaccaattgctcaacatacgaattcccgttctatgtgatccaagcgccgatacacattttatacctatgagtcccgccgcttggccaccacggagagcgagagcgaacaaaagagatccgcgcgcgcgtttcagatttcccctagtgattcgggtatgaccgatgctcaggaaggagaaaaaggaaaggaaccttcatcatccgttatcacactcaaagagagtatacgatctacttacttagttgggtgtcattgtaacatcttagttattaatgatctctcactgtcttgctcgccctttgcaaacccgcctcgatgcacaaacaaagatcactctgggcattatcgactggtcacgaggaaaacatggtccctcgggaggtaacggatgatttcccatggtaccctcatcaggtgaagcttgatctgcccaaaccagagacgacatccagatccaagaagaatagtcggctgtcataccatcctcaagtggtcagtccttggcagcttaagtttgcgttctccgtcgctaagtaaaaccttggacagtgcggcagaggcctacgggtccaccttggagaccctagggaggcggaagccaagcatcctctatcaaaatcaataggacgatatgagctacagctggatagtacaggcagatcgggtgagaggcttcttacggattccaatctggtaagctgtccctgctcacctgatgcgttcagggacaatctggttctcgtcgattcgcgcaggtatgcgcctggaattgaactcgatgacgagtttaccagctgaatacatgcggattggcgatgcagccgaaaaggctttgattctatttccaccggtcaaatcagggcgtcattttctggactttcacctgaagcccccacgatcctcgtcacccctgctgcccataccggctcatccacgtcttctctccggtactcccgctgacctatccgttggcgaggtgtatgaacttatccgaccctggggagccctgtcagtgcttcggcactcttcgagcgagagcgatggatcttgggaagtaggattctggcgagaattcgatgcacaagcttgggagcaggagtgggacagtggctgtttgggcgagcgcaaggtgtcagtccgatcgatccgatctccttggagcgttcgagtctcgaagctcacattgacgaacacaaataggtcaataggtcttctccactcgacccactcgctcacatctctgaaggctcagctccaggtcccgctacctgaccccatcgtatctcccgctagacgcagaagagcatcttttcaatcgatacgagggataatcagacacaatatggaggccaacgacagtacgaaacacgatcgggtagtcgagtatcacggcagcactgacaatttctgtgggaaatccccaacaataatgaccggagcggaggcgactagcagggtcgttcattcgctatcgatgccgtcaaaggaaatatctgggcctgctgttcagccgagtgggatggcaacattgagatgccacaacattccgcactcggcagactcgatgatcttgttccaacgagtcaacgcggtaggtttttcgtaatgatgagattctgatccagtcttgatcgggtttgatttgcagatatgtccagtgatcaacgtcaagctgtcaagaaggccagataatcaaagccgtgagatggcggtattgacgttcaactcttggaaaatcggttggtattccctttgcgtcgtcacagtaagcgcatggcgagactgctaaatcactgtatagccgcgctcgccctacgacgtttgcaaggatttcacatcaacgggaacacactgctcttcgaatttgagcatactgaagtggccggtcggtctgatcgtaaatctgaacatgagaatatagtagccgaggaaaggcaagaggcagtgactagctgccaagctacgcgaacttccgcaaccccaatcagcgtgttgatggtagcgtccacacagacggacgcggaccccgaactcgcctcgacctcgactcagaccgacgcatcgtcgcgctctatagcatcgcagtacgatccccaaagtccccttgtcttcgagccgaaacgagcgcagtctgatctggtcgcacggtggacgagcctaagctctgtctcaccggacagcttagcggagcttgtccttcatcccgctcggagcgtttggatttggctgtacaacaccaccgaggaagcgcggaaagctttcaagctccgcgaggcagaacccgagatggagcgactgagtatgcgctggctcgagatcgctaccgctcgagatgagatctctacgcactctcgcgtttcaacaaatctgacacggctgctgaaggtaagttcgagcccgaagagcagatgcatgccgcaagtcgggagctaagggaagcgtgctcggtagacatggggctacagggatcaaagcgcccgcgtgacagagcgcttcttgaaggaggaagacgtgcccagcgttctgatgctcatgaattgttaccccgccgtgctgaaggagatgattgcgtgcaaacgcttcactcgtgttgtcaatgtagagcatgcgatatgatgagcgttacaaccttggagtgatacacgcggatgtagggcgttcagactggagcggggtgttgttatgatgttggacatcgggccgagtgcgtattcaagctcggatctctttttgagcgagctcgtagtcttcgaacccgagcgacttttcaactacatcgagcggcgcatcgggctcgaggtgaccctgctcattccgtcgagctctgagcaggggagtatatcagatgagcagcctactctgactgaaaagacgattgttactcacttgaagaacgtgtagctcaggaccatgtcatcgacctgttcggccgaggggtcgtccaggatatccttgtcgatgaagaagaagacaggaaggtcgacttgctccccagctcggattttttgttgctcaaagcagaagcattccactttggcaaagaatggcgagacctacgaggcgtacgtcggggagtcagctcgacgagatacacgtgattgcctgagcgaaactcactctcgacggcgtaatgttataggtcgcgataccgaccacatcctcagtaccccagttttcggccgtatagaaagccaaggccgtctctccgggcaagaccttgacgaacctctgctgtggcgtaaacttccatttcaagtcgtcgctggcagtggcctcgaaatgcacggtgatcctgttcctcagatgggcatcgtcgtcggggtaaagccgatcgggagtgtacttggagctgtctgttacgggaattccaccgaacccggtcgcaccgcagaaagctcgatagaggggtaccgaagcgtaggttaccccgaaagccaaaatcaactgcggtatcccagaaggcggatcaacatgcagattggtgattcgttatggtctgaagaaagccactcacgcttccagctccgtagtacatggcgttcttggacttctctccacgagcctggtacatccgtcgttgacgctcgtgcatcatctctctcgcccgctccatctcggccggtgtcgcagcagccgcatgggtagtactggcagtcgagcttgtcgaagccgatcgtgtagaagatcgtgtgacctgtcggatgggcgctgtcaaggatgtcgacttgatgcaagaggtcgaaccctgcggagaacggataggcgccgagtcaggcttgatgaggcgagcgatcgactatttctcgcgaaagcactcacagttgcaagctggcggaagcccacgtcgaataatcggtaacttcttgacattatacttattgtcaattcgaggtgaatatagccagccgcgatcgtcgttgcttgaatctgcctgagaggtagcagaatactttatttgatcaagagtcgatgatcgatccagctcagagcctagaggactcagggtttggccgatcgtcgaacttttggtggttgattcggtcgattacggcatcaaccacgagcggggtcggttacctcgctcgctacacctcatcagcaggagtagtagcgatgtacccaacttgaacagccaaggctaatcctgcggcctcactttcatggcagttatcgccgtgtgtataaaccataacgaaatagcatctcggatccctcatcgtggtagcagcccagaagctcaatctacgacctgtaataccaatcccggacaatggctcaacaattccagcctcccatcccgaccttgcctggcaacatccaagctctcctccatccttctcctaccctgatatgtgactctcttcccgactaccttacgaatagcatgattcacgtcctccgggattcgagccggcacgcgaccaaacgacggagaagctttgaaaaggagctccaggatgccgggttggatctgaacgcaccaggaccctcgagtcgacggaaagatgtggacgaggcaacggaacagaaacgtgtccgagaagaggaggagaaggaggttgaacaggggttgaaggagaggttggaagccatcggacgggtcgtaggagctcaaatcactgaacagtcagtcatggtcgtcatccgagctcaaaacgtttctccctctcccggcaatgctgatgtccagagacttaaacacttgtagcatctcgattcatcgtccacctccaccgacacatctcgagatggtcaaattcatctgcaaagaactcttcctgtatgtatacgccaaacagatcgataatctacggacaaaccaccgggtaggtccttgtctcgctatagtcatcgccatcgcctgaatttcgtactgatcgagatacgttctctcgtctcgtgcaggggaccttcgtcttgcaagccaatgcactaccgccattgatcccgctatcaaccgtagcaggcccagcagccgatgtggaggacaccaagatcgtgagtcggttgcggctgcatcccgatcgacctgtccattggtgttatatcctggttgacctagctgtgtgctcactattacttgtacagtacctggcgtaccctgcagccatgatccagggagctctagcgaaattaggattgaacgcgaccgtcaccgcggagagcagtgggctaccacaatgcaagtcctcttccctcttccagctggtagccgggctatcgtacgctgacccgtatatttccatacgagtaaacaggtactttccagatcaagacgtcgaaggtccaacccgtcgggtcggcgtattccacgttgacaggaaatccggctacagctgggggtggggttaccaaataggttcacggatctccggcttgaccgagcaatgaagccatggacggtcttgaggacgattgtgtattacgattgataacgatgacatataccatgatgcgcgagattgcaaggtgcgactatgcagagatggcgctgtccgtcgttgtaagctagatagatgactttcgccaatctctggccatcgtggctgaactgttaatctgcaacaagcgaatggggacgcgagccgaaaggacgaagcaggtcgctgttgtactgtgatgcagcatctcggtaggatgaatgatatcaactggaacgatgctcgttgcgatttagatgtggacgatcgtagtcatctccggttcatataaaagtgacgcatcctgggcgtcgcgtacctctatcctacgctacactctagtctatccccatgccagcgtggagtgatccttcaaccagctgccaacccgtatacaaacgcgcgagtgcctgatcaatggtctgactccccgtcaccacaaagagggcgggtttcggcaggcatgtcgcacggcgtgatcgtttgagcaagcctcctatgagaatattgggttatcactgcttagaaaaggatggccctccattaaccatcatggaagctcaacgggtggcaaggtggtcttgcgaccgagcgaccgacttctcgtaggactggcctaatcactacgacatcatccgaccgggggggacgtggctcatcgctgcagagtcctcgccgcggctgacccaagcgcccgaatttacttccgttcacttccggtgacgacccgtggtactagctcactctaggaagcaaaagtccgcatccatccagcctcggtcaactcccatcccatcccggcctcagctgttaaagcaggaaacaagaaatagagagagtatcgctctcgacgacgattgtcttccagtctgtagattcacagcctagcaaaagatcgtcaatcgacgtcgtacatctcgctgagatcagacccttccccgctaccaaaaagaagttgaacccgggacaaccttctaccggctcggcactttccgagatcccagtcgaccgaagcaatgtcgcacccgctctccatgcctgcacctcggcaccatccttccgcccaggccgtttcccatacgacgatctcatctttctttggtggaggtgctacctcgcctcaacatcgacgaagtcccagcccggaatcgggggagaagcatgccctgagagcagaccttgaaggagggaatctgttgagcaggaaagacgaactcgatttgcacgtcgatcgggtgagtagggcgatacctactgctttgcccggatggcgagacgtcatgtctgtgcgaatagagctaatgtgatgatcggtatacgatcggatccgtagtccctcaaagatgacctgaagtcgacggtccctctgtcgaccggcgaaagcaaaagacgagccgtctctgcgaccatcatcggtgagcctcgctacgagttcgcatttgacatcatcggttgttgagtctcagttctctgtcacagttcccatttggatcgcgctcagtgcaggaattatcgtctttaacagcgagtccatctatacctctgcacgacccgagtgataagctaacccgaacctgctcgtcgtcctcagaatggctatattcgaccgccggatttccctacgtcagtccagatgaggtattcgtacttcgatgaaacaagctcatgggcgattctcgagacagccaatctttctcacatcttatcacctcggaggagccgtaagtcataaccctccttctcgcccaaactctgtagcccaagcgagactaatcgttgttagcctgtccgtcgtcctcgattgacaggccgtcggtacgaggttactccgaatgtttacaccgctgatgaacgggctggataccattgatatgacggtaagcatgcctcgttgtccagagccgcttgcgccaaccgacagatatggaggaagctcattgttcccggtttcggtgcatttttgcagagagaaaagtatatcaagaacatcctccctatcggagtcttgttttcaggaagcctgatcctgtcaaatatggcctacctcacgtatgtcccgtccggtgatcccagctcggcaacgcagtaactgctcggctaacgctctactcggatccgcctactagtttgtcggtctcgttcattcagatgctaaaagcttttcatccggtcgccatcctgctcatctcggccgcatttaagattcaaagtaaattctcgaaaccacatcgacgtgtttgaaacggatcatgaggctgatcattgtccccttaccagacttgacgggaaggttgatcgtgatcgtgctggtacgtttctcacgatccgttgaagcgcccttcgcactcgctgagagatttgattcccgcagtgtatctcggtcggctgcgcgatggccgctctaggcgagctagaattcgaaatgttcggctttttgtgtcaagcctcggccgtggtcgtaagtcgggtcggggtggacgggtacgggtacgggtacgggtacgggagagtctctgatgcctaatttcttcgcagttcgagtccagtcgattagtcatgattcagctgctattgcaaggcctgaaagtgagtagacggaccgatcctttcggataagaaatcgcccgactgacatgagcccgatagatggaccccttgtgctcactgcactattacgcccccatctgcgccatcatcaacgcttgtttcgtgccattcaccgagggctgggcgccgttcttggcctttccaaagatcgggtttaccatcatgggtttgaacgcgctcaacgccttcttgctgaatgtcgctgcggtcttcctgatcggcgctgcaggaggacttgtcctgacgctaggtaagacatggcgttgcaacccgaaatcgaaagtcgttacgggctcgactgataaagtgccctctttcaccagctggggtcttcaaggatatcctgctaatctcgtcgagcaccctgttcttcggttcggtcatttcgcccttacagattttcggtaagtcctgacaacgatgttacacattcgccgcctgttactcatgccaagtctctctgcaatatccaggctatgtcatcgctcttgtcggactcgtcttgttcaagacggcaggcaaataagtcctgcagaatcaatgccaccgcctcccgcctcatacatatagaatagattgcataattgaacaagggtgtatcattaccgcggaaaagatacaccgtgacaacgatctcccgggcagctaccacacgttccgttcgctcatcggtgctgacctgcagcatccttggagcaagcgcgacttctagtgagtgctaggtccgggtatgggcccattatcgcgcaagatttccttccagataggcctttcgtcccatgagccttcgcttctggtatcgctgttcgggatcgtcgatgtgttgctagggtgaccacttacgccttcgcctgctggcagatggtatgccagggaagtggcagacaaccccgaaagactgagcgtacgagtgctaaattgctcgtcatctgcgggagtgagcgtcactctcgtgccagagcgctgcagggcccgtaactgctcatcagcaagctctgctttcaaattgttgctatgtattgcctgcgggttatatgggacgtgcgtccgcccgtaatgataggtgtgatcatgggtggaaatagcgtttgacgacaagttccggaatcgaggcgggaccggaggaacctgaggtgctggcgttgccgccaggccgaaacctgagacaggccggaaccaccctccagtccacctccgaccgaaaagatgcgtcgattcacctgttgactgacgagaacttgtgtgactgaacctagaaacgagaagaggtctctgcacacacaaaaggttcgatcagcggtgtccccggacgcatatttagcttgtaccttacgtctgagacgctcgctatggaccgagggtaatcatccttctcgtgcatagcggggctctgcaggtcgggcgcgaataaaagagtcgtctctctctccctttgctgccgtcgtctccaccagaaccaggctgtaacgagcaggagcacggctgcgacagcgccaatcgtcccagctgcaacacccgctatctcgttcgcgcttttgccattgcgggtagacgatggcgaagttttgtcggtatgtatcgcatcgggagagggcgagaggagcaaatctgtcgttatcgccttggcggaagagtctattgcggtgcgcaagccttcgacaggcatcaaggatacgctagacgtttgcaggcttgagccgaccaaagttcccatgttggttgctgtctcgatggccgagaggaggctcagatcagctgtcggattggctgttaccgatccggacacagcagtgattacagtcagagaagcgcgtgagctagcagacgattcttgcacaaaggccgtcccgacaggctgtgcttctttcgaagcggacgtcgtcctgcttgcgacaagcggactcagcgacaggaacccggcagacgtctccctggccggatctctttgcgactggattgtcgtctccgcaggacaattcggtgtgacggtccacgtctcgctcctggtaacctgctcccatcgtatggaagtcacaacctctcgcgtcgtcctggttgcagttgtggcgtcccattccagacaagagtctccgttttgacgcggtatgaagggaggatgcgtagctcgtcgagattgtcgtttccgccagccctgcctgcctccagctgggtcgatctggacctctactctggccgtcattatcatcgtcaccttgatcttcggtcgtcgcgctcggtcgagatctcgaccaggagacacaggatgacgttgtaggggattctcgcgtaatacgggttgatgtgatcaactcagtcacagcagatctgtgttgtattaccctgtcagaccaaggatgaaacgaatatgttataacgatggctcacgactgagtatacaattccgttgtgaccttagcactgcaggccatcgttggcgtctaattattgcacgactattcgcctttgcagtttccatcttccgtcaagcaggtcatgcccttccatatatctcgaaggataaaggagacaagcggtgttcaacaccattgcagtacctagcaaaaggtcagaggacaatcgaagcgaaagctgtgcaaagggacccgacttgtcgagctgaaaggggttattttgtgcagcgacaacggacccttcaaaggggcgtccttggacgggcgtagatctgcctgtggtcggcgcccaactagattgaccttcgacgaggtcatcatttgtctgatacccgtcggtacacctgcatcaccaagacgccgacgagcacatttacagccatgtagatcccgtatgtgtaacggggtcctaggaaaaagctgtaggtcgcaactgcgatcgaggcaagttcaggcagtctacagtctggtgatcagctatggacgatcacatgcgctttccgaaccaacctacttagagtcccgaatcgtgacaatccttcctccagaaaacccttcacacaaaagtgcgaagcccatcacctcaaacaatccccaatgggagccgaagcgaaaagcatgtctccaatcgactgctatacctcggacccacaccagtaccgtaggcgcagtcaaggagagcaaccaaagcatcatcagcaaaagggagtgatattgctcgaggctctgtgtaatgaaaacatgtcagcttgagtagcaattatcgctagatgaaacccttactgcatctggatggcttgaagcggctgtgctgaaatgcatcatgaagatgataacgaaggcaaattggtacggcacaaacaaccacaggagggcgaagaggcccattaagccgatgactctttgcttgacaagcagtgtggcgtcgcttggcgtatatctgatcaacgacatcagccgaggtgatgtcttgcataaaccacacagtcttaccttgtcggttgtgagaatctcccgatggtcgcagaccaacaccgtagggacgcgagcagtacaatatggctgagccacacgagtccgtatgcgacaaccaatgcaggaggaatcaacggtagaagcgtccaagatgtgtttccgagcaagtatcgctccgaccctccgggcaggattcttcctaagggcgaggactgcacgactccaacaacgacgatcgccaaagtcatcagaactacctcttggctcagcgagttggcgagtgcgatagagaatgcagggaagattcctaagcgaaaatgcaaacgtcagacatagctcaaggcaatgtgaccacctgtcaacgaccgacctgtactgcggaatttgcgaagctgatgagcccaggtgagggcaatccaacctattgcccaagcgatcggcgctgtccgatagcgaagcacgcttaggccgggggtagcagcccaatcgatgctcaaatacaccttatcgatccaacaggtatcagaaggatcctggaatacctccaccgaatatcccttgccactcgatgttgaaacaaaaggcgcggccgcgctgtgcgaatgcaagagaagcgagacattcgcttgagggtagtgacgcctttcgtgcgtttcggaaaggcttcgcccatgtttggtagtatgtcgaacgattggggacaagagctcagagcctgtatcatgtaataacgctcaggctttgttcaagtgagccgcatacgagcaaccgcttacatccattcttcttcctcttgtccagggtcagccgataggccaataaggagtgatcgagtcgatcaaaatgccattctcggcggagtggcttccaaccctgatctataagcgactgacatttagcatatgctggattacactcgagtcgttgtttctgcctccaacgcaccattaggatcgccgggcataccgactaccgcccaagagccttcatccgctctgatatgcgctattccggagaacctggcttggataaacgtcaggccggtatccgctcgtacaccttctccaggaactgggaacgcttcgcgctctatatgcgaagagaatggtgcggagggaggcaaaatctgaatggtatcgagaattgctggcccgtaattttcccgttgcgtgtgaccagattggctgtcggtgtaaatctccaacgatggcttcccttccggtccgataccacggattgaatattgtcccagcatttgtataatgcaatcttccgatccagtcctgaaacattcaatggcgaacgttcgactagcacgaccccgaattacaggatcatttggttccagaaccgtccatccagcttctgggtgcctcggtgaaaacgctgatggcaccaagatgcccgacggcacagaaccgagaaactcggtgcgcaagattttcaccatctccgcttcgcctttcgacttgccgtgctgagacagcacactatgcaatccaagaaccgctcgagccacacgcgaccgaatttgatcacaccaaaccatggcctgatgatccacgcctgtccaaatcccgtggattcccgttgtaaacacgctgaatgatccgccacgcttgtccgcagagtatccgggcaaaacacaggcgtccgaggagatttgtgtgtctgccgtccctccgcagatagacacgagtacagggacctgaacatcttgctcccagtaaatgtttatatcgctgtaaagcttttccatgccccggtcgattgagacgggtggcattgcgtgaggtgtggacatggtgatgatcgcagcgaccagctccgacatgttatctcgcgggacgtcatatccggattgtactagagttagggaaagccttgcaacgatgccacccatgctgtgcccgagaagtacgatatgccgaggcgaatcgtatcgtgcgactatgtaccgaatggcatgtgcgacataatgtgcttgatcctggatagaagctgagtggaacgccgaaaattcctcgttgaagtcgactactcagtggctttcagcttcggacttcgagggcgagacgagtccctgcagcctaccggtatagaagtccagctctttccaatctttcatactaggaacacctggtcgatctcgaaacctaatatcgtccgggtgcgaccgcgagtcgaagtattggtgagctgctgatgaagcgatggatcggacttgtttcgacgagcctgcattgcccggtatgaacaagactggctgacccgtaggctatcgtagtacacgtcgataggaacatgttttgagtggctggaatctgtctgatagtcgcggcacttgcagacgcacctcgacatgaccttgtagacctccctcgcggtataaccatagactatacttgtcctctaatccgcccatgccttcccttctgggcccgtccatcttgatataattcggactcatccagctcattcgacaaccccatgttcccagatccagctgtagggtagaatgagaccgaaagattgcgtagatgatcgatagtgagaggagcaggattagccatagcgaaatgtgtagcttgcgtgggcgagtcggggaatgagaagtcggagaaggtgcgttatctacatcttcacttgcggagaccatattcttctctgagaaagctaatacgcccgctggcacacccgctcccgacttgctctgtccaattgtattcgtatccatgctcgtcacttgtcaagcagcttgcatgatggtccctgtcatgaagtcgagatcacgtgactggaggagacgcgccggattggatgcgatgagtccaaggtcacgtcatctttccaaaccttaattgtcgaatatgccttgagacgttggtgcgtgagtcggggcatctaacgcccggacagccacaaggtgcgttgggctgatgtaatggactagacgtactttccataatagttcttgaatacaagctcagcggagtttccttccggtccacattatgcagacttcgcttgcaattcgcaatctttggtcaaagtcgtctgtataatctccaagtccgtagtagcccttcaactacagtatccaccttgtgcctcttggcatcttattaggtactcgcctcttctccttgactatactatactttccgcgatctagcgcaaaaccaagatacaagtgtttgcaacatttcctctcgtcaagcggtagcagctcgtcaatcaagtaagagtgagctgtatgccgcatttcgtcgggagaatgacacaatactaaatttgcgtgcatagggggtgctgtattgcacattttcgttccattcaacggtcttgttggtcagatttggtcgacgaacaacatgcaaactgattactcgagtgctgcttcagcaggcgagttaccaactcgctattccaattgcctccgccgtgaaattcacgtcattatcaacttttgcttccgttcgcctccgacccgacccctccagcccgagatcgtccaaatcaaaacagcggtacaagcgacgtggtcttttgaccagattgtcacagctatccccatttatctgaatcaagcacgcaactcgcagtctacatcttgtcctgcaaggaaaacctttcatcggtctagaccagggcgacctcctgcttgaccctttcgttgctgacaaccatggaatcaatcagccggtagtcacaaactgccttcaatcattttgcagataaagccatcaaaatagacgcgacatgagtgcttacccatcgcacgcatcgccgtcgaccggatcgactgggctgccgcctccaccagttcaacgtcctccagtcaaagtcaagatcgtcagctggaatctaggagattcgttgcccaagggagatctatccccgctgttcggagatttctcaccatacgaacctcccgatcatctcccgctcgacttgcccgactttggcacggaagatgggcatccctatcacatcgttgttgtcgcgaatcaggaagctccgacacagagtggggtgcctagaggactaggcggtggcatcacgaaaggtctcgctggacagaaggaaaaggaaaagctgaaagaacgtggaaagcttcagggacaaaaggaagcagacaaggccaagaaggatgcagccagtggagtgggaggcttgggactggggatccttgacgcttcgccaatgacaggtagagaggagttctcgaaacaggtcgaaagcgacccaatattgagtccgacgtacacgccgcaccacggacatcacacggttcacgtgaacatggggacgaacaagggttggtcggatattcttgagggtgagttgagaagcgcagacgcatatcgaccttggcaattgaccgatcggtctggtttagacttcctctctcatggtattcagcaagctgggcaatccaatggtcgcaaccggggcgcttctcgtagcagccgagactttaaagatctgccgagacccagctttctctcgacgtctggttcagaatcgcccgaggtgtcctccccggcaaccatgacaaaacaggagctacctctccccgttccgccaaggacgcctcacggtctcgtgcctcctcccttagtcaaccgttcctcttctgcgcctccggaccatccttcattgaccttacaaaccgtcgggatggatgggagcaaagcgaggtctgccgatatcacaacaatcatcacgccaagcactcctgatccaatcagttcgcctcggtcggaacgcgcccacatgctgggatccagcattgacaggaacagcagtgcctcgccgttgtccatgttttccgtcagttccgagtcgacgactccgataatgaatcgatcgaagattccgatattaccgggaccaccatcagatgataaacccaaggaagaagacaaggaaacagacaaggacagggagagggaggtgaagagatcttcgtcgttgttgaagacgccgctgttgaggaagagagacagcgctaaacgcttgtctcctatctctatcccgtcgcatgtttcgaacaattcactgcagtcggccgcctcgacaccagccgtcaacgcgcctgaggcaggtcaaaaacgacgtggggctggcccgtatcagtttctggtcaaggaacgtctgctcggcctctatttggccatcttcgtgcacaaagactgtacctcgtgggtcgaggggtacgatcacgactttgtgcctaccggcttgatgggagggagaatgggtaacaagggcgcgatcggaatatctctgaagatggccggacatcgattcttattcgtatgcgctcatctggccgctcatgcaagtcacatggaagctaggctcaccaatgtcgagaaaatcaaggcagagctaggtaaaaacttgaattgcttcctatctgaggaggaattggccatcaaagcgcctcctggcgggacaatcgacgatatcgacgtcacggacaagtttgacacgacattctggtttggggatctcaacttccgtttagaggtctccaggttacatgctgattggttggtcaagcataaggaatatgaaaaggctcttgaattcgatcagctccgaaacgccatgcgggaaggcaaggtgtttgaggggtttatagaaggtgatatcgatttcgcgcctacgttcaagtatgatgtttggcattcggccaagaaaatgcgaaagcgaggcgaattgcaagcggcaagggacaagaacgtcttgcctgaagttgaggaggcagagcaaggagaagaggaagaggatgattcgcccacggacgatcaagcgagttttgtctcgacaacgaccatgacgatggaccggcggtgttcagtggactctaatatgtggttgggaggtcagatcgaggaagaggacgaagacggcgatagcgagtcgatgggtggagttcgcaccgtcagccagccaattcggcctatcgctgctattgcgaagacgggcgccatcaaggtcaagcatcgattcatgaagataatgaagagtgcgagtcagtcacctgtgtccaactcgcctgtgggaacaccccggtcacaatcaccgaccaagagtctggaaacggcctcgttgtcgcaaaagaattctgacagtatcagtcaaccgcccagccggctcagcatggagagcacgagaccatccatcgatagcgaggctagtcggccggggttgacgaggcaaatctcgaagactttgaaaaggcgtcttagcggcagggtgccgcagctggaggattcggcgagtgacagcgaggaggacacgagggagggtgtatatgacacgtcctcgaagcaaagggtcccaagctgggtgagtactactcgggatgctcgctgaagcggtatagaggctgaaccaacaagcaaacgcttgtagtgcgaccgcgtgctctggaaaacacacatcgagcaagacatcgggccgcaaccgcgacaattcgaagtactcagtggacaagctcgatttaagctgttcggccacgccattgcccagaagttccaccgaaagactcgagacgcgcgcgagcgaggtgatcagcttcaaacgcgattcactcgcatgatgggcgatgcatacggtccccactcgcatacactacaaacggttccgagcgcgacgacaccgacgtggacgaaacgacattcactagtcgaaggcgatttagacactccgcgagcttcggtgttcagtacccacacaattgtgcctgatgcgaggtcgccgtcgccgacggacgcgacgatggatcaaggtcaaatcgggcggcaatcgctcaccacaatcgaatcagtggggcatatcaggccagacggcaagttcgactccccgatgggcatcacacttggagccccgatcgtttcagagccaaaggtcgccctaatttcggctcaatcggaaaagcctgaatcgcctcatcgccaccattcaggcctagatgcttactatccccatcgcaaggaacaaccgagccacatgattccgcgttgccgtaccatctctggtgctccagggcacgacctgacgcagccggatttgatgggcgagacgtccttggcatctgcaaggcgatggttcagcaacctgccggggattctcttgcatccacgtggatccattaccgatcaacaccatactatgcatgacgacgtggtagcaccggtggaaccggaacccgagcctgtcattcgaaggcgcaagggtgaggtggattgcctcgaatacacgactatcgacgacgttgggatgagacgcctggaaggccggtcgtaagtgattcgttggcgcctacagatctgtctcgcgcttgactgataccctatctctcgcagtgatcaccgcccgatcatcttcgcagcagcagtatatacataaaatagatgcgatttcacgacccagcccatatctttcacgaccccatgtaacgaccagatcatgcaatgttataattcaggagattcgattggtaactaaaacaagaagcgtgcgtgtcgtagggtagcattcattaaaagcaagaagagcaaatcagaaaagcggtcaacaagcaattgggtcgtcgtcatgtcatgattcgtcgctagcggaagagcttgctcttgccattgcgtcgagggggtggcggtggcggagcctgaaattcgccagggttggtctggacccagccgtgagtctgtcgaggcagaggcaggacagtaagcaggcatccagggtcgcaaagcgtcatgtctcggtactcacagaagaaggtagtatcgcctgctgcacaaagaggctcgtacgcgaaggagaacccgacttgcgcctactgatgggcgaacctgtcaagaagccctcggcacgttcgccctcctcgtcttctgcctgaacgtccaggccccagaaccgcttcgaggtcgaacccaagctcgaggtcgtattgctgctacgcttgctggaagcgctttcccacacgctaggcgtggattgcatgtcccccagctcttcgtcgccgtactcgacggtctcggtcggcgcgtcgacggcggacatgtcgaatccgaggccaacgtgattcgacccgaacgaaaagcctcgactgagactgctcttttgcctgacgtgttccctgcgcgatttcagtggagtcacttttgcccttgacatcgggctcgtctcgacagagcgaccgacgaggtcggacgacgaggcggccggcaaaaagtggttcgtcatcgacatgctcgatgcgcctcgacggtgaccgctgctcccgctcttcttatcgctagcgcgtttcttgctgcgttgcttgaggggcgtcatcttggccttttcgaaggatgattccgaagcgtcgcccaatcccgaccctgccgagtgggaatggggtaggaaatggttgatacccgaagccgacgatgcccctcgctggtgccgacggctggcactcgtgccggctatgggactcgctcgacaaggcgtaaacccgaatccgagaccgtggatcgatccggcggtggccaatccgtcctctctcgattccgatcgcacaaaggctcgtcgctttacgggtgagggcgaggtggacattccgagaggcctatccgggatctcggcgatcgactcgaaggtaaaagccgaccccagactccggtgcgtcccgactgcgccagcggcggtctctgtagccgaatccatgaccctctctccgagaggcgcaacgttctctttaccccgtccaggagcgccaaacaaccccttgacccgggtctccgcaccgacgaccttgtttggtccaaagagtccgcccgttagaggtgcgggaaaggcgggaagggcgaatccgccaaagtcagggttaggagtctcttgtggggcgtcctgcaaaggggatgcaaaggtcgaggtatatggcagtagcggagccttggcctgggccatatcgttggatctagccgaaggaaggaaaacgtcgtctaccaagtcgggtacagttgatcgaggaggttgcgcgaccgtctttttctgtttcctggtgacgggtcttgagtaaacgtcctcgtcgtcgtccacttcggctgtggcgggcaaagtcgccgcattgatggcggccgtcgccgttgacgaagacggtgcggatgctgatgagaaagctcggccagccaacacgtttgccttgctcgaacctgctcttccgcccaacagatgtcggacgggcgagtttttcaaaccattgatcaagctcgagcccgaggtcgacgatctccctgctgccctgtcgacgtccttgtttccacgggcatttgacggtaggtaagcgctcgtcgcgggattgctgtggctggtatgattcgcggtgtgattgctcgaattcgtcccgaacaacctcgacttgatcgtcttggcctgatctccagactttccccgccgatgcgtatgagcctgtccagccgtcgtcgtcgtcgtcgttcccaagttggacttggaagccatcgtcgacccattctctccgagtcccattcccaagcccaacccgagccccgccgaaggttctaacccggtgctctttgcccgagtcttgttattcccggcattctcgttgcctaccgggttttctttctctcgcgagaccatcttgacctcgctgtccctcttcttgccacccgctccttctagcgtattcacggtccctttcgtgttcgtaatcgcggggccggtcataggaatcaagttgctcttgttccccaagacgttcctccccatcaccttggcttgcacctgtttccctgtaaaagaagggatcgcgttctcatccgcgcccgacgagttggttttcagcccaaagatcgatcggctcatcgttgtcgcatgcacaccggcgctcgagttcgagctgtgatgggcatcgtgaccatgcccatgaacttgtttgacggtaggtcccggggaatcctgatgcacagcgaacaaggctccctttttatgtacgggcggcattctcgatatcggtatcgatatttcgactttgttccttgtgcgtgtatatgtatgctgggtctcttcaatggttcgtggtcgccgtcgtcaaaggtcgtatcgcgtttgcgccgaggagaatgagatggatttgcttcagaggctatttaggcgtatcgtccgtgtcgcctgtctttgtcggtattcttgtccagtaggacgatacctgcgcgtgtgtaggagcgtatcgcgtcacggaatgtccgaaactaaagtcttttccaagactgttcgaggtcgccgggttggttcctctttctctccggaatgtcgtgttcgtctgtcaaagatcagctcgatgatgttcagctgctggtcgacatgtaacttttcggtttgcgtggttcaagggagcttactatagcgtattactgcgttgtatacgttcaggcaggacgttgtagcgacaaggtcgaggggtagtcgcagagtggagtggtcggtcagggtcgcgtttcgagaagcaggtgtcggtcgaggtgggagaaagacgagatgggaatggaatggtgatgggacggcaagaagagtattcgtcgaccgaatcgcttgaagatggggggatatcgctgtacactacagtcttctattgagtgttcaaacagacgagctggttatgacgatgatgatatgatgtggggtgtaattggcaagttgcaagttgcaggttggcaggttgtttgaattgacatgttttgttgtttagagggagagagagagggaacttggcgcacgcgggagagagacagagagagaggcagaggggcagaggagcaggggatcactgagacatgggatggtggcgtcacatcggtcatcgacgcggacttacggcatttcagttgacgagaacgttgaatcacgtgatgctcgaccgaggtcatgtcacatcatcaacctacctcacttgttgaaccggcatgtacatcatcgtcagggtgaaaagagtgctcactgctgtccacagcacacagtcatcaccaacgacaacctaaaaccgaatgaaagcagtcattcagcgttgtctctcggcttccgtggcaggcaagtcttcttctacccatatctcggcgacccgcgctcgcatcaacttatacctatccattttctgaccggcagtcgagggggagaccatctcgtccatcgagaagggcttgctcgtgctcgtcggaatcggccatggtcagtgaaccccatatctgctcatcagaatgtacttgatgaattgattggctgattctctgcgcctgctcgtgctctcgttcaaactcttacgcagacgacacgccttcggatagctctcaactgatccgcaagatcctcaacttgcgcctcttcgacggtccagctcccgcatcttcatccacagcgaacacttcaacgaccataactggtgaaacacctttagaacctccaacgccgacgtcaggtaaggagaggtccacggcctggaaacgcagtgtgatggatatcgagggggaaatcttgtgcggtaagcgctcccgacacatccgtatccttgtcgatcttcctggcattttcgctcacgcttgtatcttctctatgcgatcattttggaaatacttgcctccatccacgtctgacccgccttgatccggtcctgcactcgatcacgcttgagcggccctacagtctcacagttcacgctaatggctcggacagagaaaggttctaaacccggtcagtcctctcttaatcacgcagtcgcttcctccaccaaaaccaaagctgatcgcttgtgcctgtactcctcggacgatgatcgaatcggctcgatagactttcatcaagcgatgccggggacgtcgtctaaaccgatgtacgaggaattcttgctcgggctcggacgggcatacaagcctgagaagatcaagggtgcgtctcatgcctggcttgatgcatttctctgcgcgctcgagtcgtagcgaatggacgttaaggaacaccccacccccccctcactcgtgccgtgttttttcttcccggctctgcagatggcaagtttgcggccatgatgaacgtgtcgttatgcaacgaaggacccgtgacgatcctcctggataccaaatccccacccaacccgtcctcgcaacccaattcgtcggcgtcgagcagggtcgggacgccggccttgcaggagttgactgcagaggaaaagaacgagaggggtaaagaaaaggcgaggttgagcaaggagaggaggagcaaggccaagattgaatgggaggccaaaaagaggcaggaaggagggaatcaaggagatgaggtcccgccgctaagccaggtataagatcgatattcccgctagttgcgtcaaggcatacaacgttgtaattcagacgcacaggtttcacaaacatggacatgtgggcgtgcaccacgtcccttacgccgtcttccttgccggaagtctcacatcgtcttcctcgccgctcaacgcgtcatccgaatccgccgcctggaacaacctcctcttcttccccttgctcccacctcccatccgcttgcttctcgccctcgcctcgtcctcgttgttaccctcggcgtgtgtccgtcggaggacgacattctcgttgccgacgtccggtatcaatccactcgcgatgaatcgtcgtcgacagcgctcgctgccgtgttccatatagtcctgccgggtgatcggaaaggtggacaagtagtcgggtcggagcgtcagcgcttgggcaccgtaaaagaccggtttcgttgggctgtccaaatggtagatagtgtgagcaagcaggctcggagggtgaatggaaagacgaactgagtctggactcactcttccgcctcgaagatgcccagttcgtagtctacaggacagacggctctcaggtctcgctcactgggagcgaaaagaaaagtttccgcaatctcagcaggctggcgggacggagcagacgagatggtaactgacaatcgctcgccgaacccttcagtgctggctaacccgccgaacaatccgatgttggcccatagcataccctggatatcttctggcatggcgcatatcacctggacgaccgtctcgaccagtccagcttgttgtagccctgcataaaaacgtcaccggaaccagtttagcgattcgtagcacggcaaacggtgaaccaggcactgaccgacgtcgctcgggttgaatacgagctcggggacagagaaccgttcgttgcccatggtaacgatggactcttgatccggcaacggggcaccttccggtcgttgtggaggcgaagtcgcgttcggacccgacttgatgtaaccctttgggttgagcggggtaaagtctggcaagcagtactcctgtacgatcgaaccctgttccgccggcgacctagcgagattcaatcctgatcagcctgatccggtacggaatcctcttcgcgctgtgaaacgcgtcggccgactcacctggcccgctcgagatcccttttccaatcagacgtgacgtagcaacattcctccctgatccggttgacaatgtgcgtctcggccacgaggtcccattgtcgaaaagaaagcaatcttttcaattggttggtcaacaatttcccacccacatcgatcctgccacgaagacgagatccgatcgtaagtgtcagtcggctgtggccctgcgtgcagcgggtgccaatcccgacctgatgctcaccgtcggatcccggtccagacaactttgccatcgacgatgggggtcacatgcgagtacgagtatcccacatcgaccaagatcgagcaggccgggtttggcaatccgggggactcgaaaagtccgccatgggggacgagcgcggcggctgtgccacacgtagaacgagggatgaccgaggcaaggtatggttcatagggtggtagacatgtatacaagaaggcgagcgcaacagaaggaaagaaaacgggtataagaatttttattctaagcgacatcgattctgaacgacaagtcggagaaaggatgatacggacaccacacgtcttgcccaaaaaggccatcatacgacaaccacgatctgtataccgaaacccagactcaccgcagctcctcgcacaactcgcaaactcccattcttcaaagatcatctgatcgtaattctcccccagcgctggcgggttgaggtacggttcggtgatgagcagcgaagtcgtcgaggcgtcaaagtgggggaatcgggaaaagacgtcgctgaagatcaggttttctgggttccatgaggtcagtaggccctatcatgacgaaagggatggtcaggacgacaaacgtggatcggcggcgcaatgcttgacacggcgcgactcaccttttcgaacgggcgtcgatagacgagccctccgtgatcctgtacgtcctcgatatccgctccgaaatagacctttttatcgcgggtccggacgagacaattctggaacaccctaggttcatacggatcaacgggttggacctcttccacttgtacggcgtcctgttgctccttgttcttgttgttgctgttggcattcttcttgccgcgtttcgtcttcttgctagacttcttcttggacggtttggaaggaccgggttcggctgtgtacaggccgtaagggtcgttgtagggtgaatagttggccttgatggtatatgcgccgttgtccaggatgaaaatgctcgtcggttccgtcatcctcgtgaggaagctcggtcggtatcggtcttccccacttgaccggctcggatctgatcgcaggtaacaaggacgaagaactatcagccgatctgtcgacgaaaacgggaaaaaccgaggaacgatcctcgtgttgcgtgccccccaggcccacccccgcatctccgtcccacgtcccgcagcgcgatcgtttcaaggtgtagttcagacatgcgattttaatcaacgctctagtagtctcaaaggagaacaaggcgagctaagcaacagccttctagttgaattttttgattgaaagttgcgattcatcatgacgacgaccgattgcgcgacgcgcgcgggaagagtagttttctctcgtgtatcgagtgctcgtgacggcgatggaagggagggtcaaggagggagggtcaagggagtagggaatcggatcgaacctagtcgactcgaggttgatgctaggaatgatgcttacgatttgtttgatgagattgatgaggaaaggggaggtacgaacgatcagggggggagtgagggagcggtgtagtccttttgatgtcgtggctatatatgtattctttttcggaaaatcctgggtgttttgcatttgcatttgcatttgcatggctgttgaggaattctgattctacctgatgcctgctgctctttcatccgcggttcgacacaaaagacagttggggtggggaggttgaacctaggtctaccctgattaatcatttgcttccatccaggctcattcgctttcgatggtggtcgcgagttttaaggcgacaagacgcgaagagagagaggcccctaacccctaacccctaaaaaaagggcgatatcttcccagcggtccctcggccattttgtgatagcgccctgaaccacccatgcgtcagacatgattggaccgcatgaggaggagcttacacaaaagaaaggttgtcactataaactcgaaactctatgatgattgctgcactaatcgttctatgtatcgccatcgttctggttctcacggctgatcgctcgggacgctattgctcgcggccatctcttgctttttcttgtcgaccgaggcaacccaccatctcgggtgcatgacgttaaaggtaacacagacgatgagctgaagcgatgaggttgtcagcagatcatgatttggggcgacacggcgcgactcaccatcaaggctccgtccaggccgtcaaacaggccttggttctcgatgatgggtccgctccatccttcaagcaattcgatggctcggtagatcgatctgacgatacgcacgcaacgagtcagccgggtcagaagcacgcgatctcgacgtcccttacttaccgtataaagatcaacaaggtggtaaaaacacacactccgagcatgatcttggcgtctcggtgttccttgtgggtgaagaccagcatcgagtcgtcaatgtggccaaggtgtcccgccctcgcagccttttcgtcgccgacgctcgatctgacgctagacaaggggcccttcttgtagcgtttggtcctgagcgcgttgggccaccaggtgaacagctggacttgatgactgaaaggcttcctggctcggtatcggatgatgtagctaagcaagatggtcgaatagaagcacatgatagctatgaccgagaagtgaaggacgcgtcagtacctgtttgtctggggaccgacgcaccgactctgtcgtactcaccgacctgccagaacactcctccgaccatgatgtaagctccgttattctgcccttgtctagtattggcaccactcgcgagccctccgccggcggcttgaacgacgagcgagatgacgtctcccgtaatggcgataatggcgtaggacgtggggtgaatccaggaatactcctgtcccaagatcttcatgagacggccgagcaagatgtaatcaccggcggcgagaaaggcgggagcgatgatcaagcagcagatctgcatgatgaatccgttgaagctatcgaagggtcacgatgcggggcaatcagtgactatgcgtgcgtgcgagtcgagcggatagagagccggtggggactcactctgagtaccagtaaccacccgagtcgggctgccatttcgtcgagactcgggaaagcaatcttccaccccactgcaaagacaaatagggttcagatctaatgacgtcacaagcgtatattattgaccaggtcaaagcgaagactcacaccaacagcttcgcctgcgcggacgacaaacgagagcgataacgagatcagcgattagtatttatcaggtcaatcgctacctcagagtcccgcccattcgacgtacagacggtcccagctccgaaagtgaacagcgtccaacgatgtctcgaaaacgttccttgaacgagatgggcaactggggacatcgagcacgacgttttcacacgaacacgtcagcttgtcgatcgcctcgcctcgcagatttgccccgcaatgagacccgccgatttacctgccgagagactgaagaggacgagaaagacgatggcagacgcccaagatacgttgtagccgtagctcgagtacgtgacttcttctctaaagtagttgggggatcctacatcgtaattgcaggtgaggtttccgggagtgcctgcgacgtgcggtttaaggtcagatcacggctgcctagagtaccacgacgacagcacgacgctcacaataagagatggcaccagacatggttgtagaacaagaagtagagacggtcgaggatcaacgaggtatcaagaggtttttgaagggttccagtcggtcgaggtttcctttcgatcgcgtggtggccgtggtggtcgatgcaagcgagtagagagaaaaaggagatttccaaactatggcaatatggtgcaacgggtctcccctgatcgtcgattataagcggcaccgcgattccctggaacacggtctaatcgggaccgtggatgcgttgcgtgtgtaactgtgtacctgtgtatgtttgtgtctaggacctatatgtttcgagttcgccgtcgaatccccccgggagaacggcccagatctcgaccgaggtcaacggatttcgatgagtttacgtcatcgatcatgactcatcgccgggcgaaacgggcccgagatcagctgatcggaaagtcgtatacggacatcaaatattcaactcgcatgtccgtgtggtgggcgagtctgacacgccggatactccaggtcatcaccacaacgtcgtcgctaacatcatggccagctcgattatactagaagacgctgcactgaagtaagcgtacctgagcgtgattccatgacatactgctaaggcgtgtagctagtcactagaatgtcgagcatcaaggcctgcaaggtatactcgcgacagatagcgttcccatgacttggccagtgataatctcgacgaatcagcggtcctcgacgtctgaattagctcacgtcgtctcgtttggcgttgttcccggggctcgcttttcgaaacgccaagccgaaatcacgctcgaaagatctgtaaacggattgttcgataccatcacttcttcggaatcatccctgcgtctcccgttcggtataacggctctgtcgacccctaaaccgagcgggttctaatgccacacatgatcatgccatacactgtctgtgcatccctctctgcatgacatatgtacccatcgctcgcttgccaaaccttgttctaggatctgctgactctcggctttgatcccgcgtttccatctcccacgcaccggaaccgagcgctgtacgcctctttctatccggatgctatcggattgatgaggacagagtagctgattgacaagtcacttaggagaggattggacctggaggcaagtgaactgaaagctgcgtccgaagcttggttcacaccgctttgtccctcaggtgattcagctgtgcgaacgttcccacagcaactgcgaacacctgatctcgtgctggacgactaacacggattgacggaatgatattccgatgtcgtacgagactctcggctgtcgagatggctatataatgctctcagtttcggtcatttatgttcctcttctgcgactcttcattttcctgcatgcatcgacgcaaaacgcctatcgacatgcaactccaacccgctcgaaccgtactcgttctcctttcttctcttttcgtagccggcgctcacccttggtacgccaacaataccgccctttacaggcgcgctccctgcacgtcgaaccagatcggtggctggatacctgcggaacccgagattacgtgtccattgggcaacgaatgctcatcgagtgggtcgatcgtcgagcaattggctaaccggaagcacaactgatatctgacgccaatatgacttgccttcgatagatctttgttggtaagccgacgaccgtcaagccatcatgtgacgctgaactgacgatctcaattgatctctcagcgacaacggtgctggtatagccgtttgctatgtaatccccgaagacaacggatgcgatgtcggtcgtcagttggagtgtggtgtgagtcgaccgaggtatgaaacttcgatgcgactcggcgtttagatcatactctgctccccgtcccaaactccgatagtccggctggtgccgagaatcggtctgccgggatcgctttaaaacatacggctatactgaagggcaagaatgcaaggaaggccagaactgtcaagtatgtccacgcgttcgttcttctgatcatgaaccactgccaagtctgatcgtgcatattacctgcatctagtcgggaaattgtgactacaataccggtacctgcggaccgagcgaacggtgcgggactggtttctgtccagtcagcagtgagtagatgagcgcgactcgaatgatccttcatctgaattgacaacgcactggtgagcaggtggactttgtctcgacgacgtctgcgaacgcattcacctttggcaaggcgagaaatgcaaagacagtaggcaatgtgtgagtggcgacggaccttctcctggtagtcctaaactgttcaaaaagttgtctcttacactcatggaactcgtaggatgaaagcccttgccacaatctcaaatgtaggattccaaagggggaagggggagattgcgacgagagcggcgattgtgtgaggatcacctcgacaatgaacagggtgagattcggtcaggctgacaaggaatctttatgacaggcggacagcagcttgacttgcgaaaacgctgtttgcaccaagaccacggaagagaagacggagccgggcagtgtcgaggatgggggtacttgcacagacccggtggactgtgtgagtcgatatgccacagatacgaacgtccctctggccgcttaccctatccacccccataacatagaaatcgggcgtctgtacggatgccctatgtgcggcaaaaacggacgtacctacgaagccggatgagtcaacaaacccaaaccagccgacgcagcccgaatcgccgaatgctccggaccgagaggtccttgaaccgatcatcatcacccagactgtcaacggtcaacctcagacggtcacgcgtactgcggcggccgctgtcaacactcgagcgacgacctcggcatcggccaggacctcgagatctacgtcgcccgccaattcagctagcgttcaaggtggaacgccggggtggtactttgctggcgcttcattggctgtagttggcgcaacctttgcttatttcctttgatcaggtcggaacgtctcgcctgtttttctaaccgtctcttccgggtctcaagtttccgtctcgatgtatatcttgttaaacttgaccaggaaagctaggcaaatctatgtaagaacgcaatcagaaatcgcataacattgtcgacgatattgcacggccgtcaccgcgagtttatcatagagtccggcttcatggtcaggcttgtgtgtaatcaaatcaataaggtcactctaagaccatcagatacaacctggtaggtaatccctagaccagtaggcaagctctcatcgtgtgtccccaagcctcggtctcgatgtgcaacgcggcgacgacatcaccatgatccccggtctttccgcgctaaagcccgaggccccgccggatgaaagtcaagggtcgatcaacgtcaccgtcgactccccgttcatcaccttggcacgttggcaccttgatcgacctttcctattcagatgcggcacatgagaagatgccggcgggggccatgggtcatgggtcacaggactcgacctgtatatattgtgtagtagcaatgagagctagtatgattgtccaagtcgcatgttcgcatcgtgtgctcgtgatcaaacggctcgcccacctaatccatcatgccggtcgacagtcaagcaatcgtcattcccgcaccaggacaagacttcaagcttcttgatgtcactctggacgaccctcaagacgacgaagtggtcgtagacatggtagcttgcgggtaagcatcacctagacgttatggctgcagtatcggcacttaggggctgtgcaaattcagtctgtgccacaccgatctggccattcagagcggggcatttccgtctccggccccatcgatccctggacacgaaggggcgggaatcatcagctcgggtgagcctgagcttagttctgatatggggtgtaatcggactaaagcatgatcgaccttctagttggtagcaaggtcaccgatctccagccgggcaacaaggttctcctttcgtacacctcgtgcagtcactgcgggtcctgtgccgccaacaagcccggagcgtgtggagaatgggacgtacgcaactttatgcgcaagcgtaacgaccagattggcgatcaggcgggagcgcacgtcaagggcaaaccggacgagaagatttgggggtcgttcttcgggcagagcgcgttggctagaaaggccgtggtatcgagagcgtcggcgagtttccgccctggatccttggggaaagagctcgatctgacatcccacgcctcccttgcagtgcgtgaaagtcccggaggacacggatctccgcctctttgcacctctcggttgtggtctgcaaacagggtgagctctgcctcctcatagcttgcttcagctccgacagctaaacatcgaccacgtgcttcagcgcgggagccgtactcaatcgactcaaacccgaacccgactcgtcgatcgccatctacggttgtggagcggtaggcatgtccgccatcctagctgcagcctacctcaaagtcaagaccatcatcgccatcgacattattccccagcggctcgagctggcaaaagaattcggcgctactcatgtcgttgatgggaaatcagctacgagcgttcaagacgtccgcgatttgacccctcacaaagccggggcgctgtacgccgtcgaggcaagcggcaacgccaaggtcttgcgcaacgcctacgacggattggcttctttcgggcacttgaccagttgcggtactccaggacctggtgtaccggtccctatcggcatccacgagaacgtcacctcgggcagaatctactcgggcacgctgatgggcaatgacaacccaaacaacgtgagcacatcgaggacgacgtcgacttgcaatacgagtcgctaatgcggcgatatctctaggcccttcctcgccttatcgccatgtataggaagggcaagttccctatcgagaagatgactcggttctacaagctgaccgagtttgacgaggctgtgcatgccatgtgagacaggttgcccgagactacgaaccaggttgacccgcgactgacgcacgacatcccataggcactctggcgaggtcatcaaacccgtcatcatctttgactaggctaacctcaaggacacatttcagtgacacgcaagtgatatcaattgtagaagccagcgttgcaacccgaaaaagatgagacaacgatacgagatgccgaaaccaacggtgcgatttgtgcgaacgatcgatgactttgtcgtatcgcccgtcaaagatctgaatctggggacagacacgtttggcggtataattatgatatcctgacatgtttcaatgctatgcgagtgttttgagcgggcgtgccgcgaaagctaatgacaacacgatctcgaatcaggccaactgcgtagtcgcagggtgcacgggttggatgatgggaccaccagccttgtccatcctggtagagttcttggggtcctccgtgacctcgtcctcgatggactgggtgtcaggtagtctgatgttggggatgaagagcgagacaacgagggcggtggccgaaacgcacatgccgacgatgacgaggagtcgctgggtttcgtcgtgggcacgagcgatagcgatacgctcgggggtgccgggagggtaactaaggatgaatttggtagggttggcgtacgcctgagaagccaaggtcgagttggtaaagtatcgctggagcttttcaggtacttcgttggtccaaattcctttgatgaccagggtatgtcagcaacgtgctatcgagcttgaagacggtactcatgctcacctccaccgatagccgatccgatacctccagcaatatagtaaacgagcaaccaaccggcagtgatagcggccatgtctatgaaaagaacagtcactcagcgtcgtcgtcagtgcctcgtcgaagccatgtccctactcacgctcatgcttggaagccgactgcaatgcggcctggatggggaaactgatgcatcctacaccgaatcctcgaacaacctggacggccgcgagttcggccttgctgttggtgctggtcctgaacctgatcatcaacccggttccgagagtctgacagatgaaaccaaagatgacgacgtatttgatccttctcgtgtatcgaacggcgaatccagcggcaacggccaggatggtaccggaaaaactaccaatgttgctcaatcgagtggcccacttgttggtctgctcggcagcgaccagcagaaaggtaaagtagtagcctccaacaattcgtccaccgataggatgcaacagggcgatcacgaagcagatgatgacggttcggttggccaacaactggaaggggatcaaggggtggggggcgtaaagtcgctcgtagaacacgaatgcgacgagaagcgcaatgccgacgaccaagagggcgatcgattgagctacgcaatcctttcgatcagctccagctctccgatgcggaagtcacctcacaagcttaccatcgccccagcttttggtcttgttgttggcgagcgtgatagtgatgaggaacatgccggcaccgccaatcaagaggagcaacccgattaggtccaattgccagaacatcgatacggctctctccttccagggcaaatgctcgacgacagtaatacgctcgttcgagtccgagtcttcagggtcgactcgcttcctctgccgcgaaccggtggcgagagcggcgatgatgggaacggccatgactggggtgatgatagcgaacatgcctggagttcggagcggcaagtcagcggtgtagattccgttcgtcgagcgtatacaacttaccgactccccatcgccaagtactatcacgcgaagcaaactcgtcagctttgcatcgttctgtgtagatttatccgtgtcaacccttacgtagtctcgagaaccttgccagcgacgtctcctccgacccaaacgttcagacaaccgggcagagtgttcggcagaatagtcatcaggacacgatttcggagcgaactgatatccgaaatgataatgttttctgcaacaggttcaggcaggaaaaacggtgggtaagtacgtgattctgaagtgaactcgttcatgccaaacttacgaagcaaaaagagcgaggtgatccccaagatgtagatggcgttaccgacagcgtaagcctagacgatcgaaagctgtgattcagagctgaagtctgaccgaagcgcaacgcggggacgacctacgtagatgttgggcgctgaagcctggatgatgtaacctgaaggtgcgaaacaccacgttaaataccgatcttcgccggacattgcagctaaacctacccagcacgtaaaggaccacgctcaacacgtaggcattgacacgtccaaaaacgtcggcgatcttggccatcggaggctgactgatcgattggaagatggctcgaataactccgatcgtggataggagcgagtgcacctcgaacccggaagtggcgtaggtggtataagttcccgaagtgtattggtctgcagaagtccggtatgcgccgtcagcatcggatcactgaaggggcccatattcaaccccgactcacccaacgacaaggtgtatgagagcaagatgaaccctccgtacaacaagatcaaatacttgacgttcattcgggagagcaatagctccattccgacgacacccttcgacttggcggtgatgacagggccatcggacttgagttcgttgttgaccgtgggcaactggtcgacatcctgacgaccatatgcgtccttttccttgtaagcggtctgttcgtcttgcgacgacgagtcggtagagcgagccatagttgtcgatgtcaggcgctcagaatttgagcgtcgttggtgacagactttcccgtgagtccgtcaaaaagactttgtcctctcctatctgataagcctatataaggggacttttcggtgatctcggagcgatgcggagcatgggaaaaaaagtcctcggtttgcgaccgcctgaccgttcagccggtcatggtgtggagtcacgtcgtgtgcacatgtttaggttcagtcgactcgacccgaacacgagtcgttcacaccaaccgctatccgtccgaaaattgacgagcaggcacgacggagcagagcgaagggtatgcaaaagtcgaatcggtgtggtgtgtgtgtggtgtgggcatcgtttctgtggcgcgttatctgattaggcgagagcgctctcggaaatttctcttggcaggtccgagtatcgtaagccaaagctcgggcagcgcggacgaccggatgggcggaactgcaggagtattcgctatgcggccacgcgggcagacatgtgagagtctctcctgtccggcgtgatggactaatggaaagccactcggacttgggatcctcttgtcagcccgaggcgtacatggccaagccattttaccaagcttcgggttggctatcgattgggttggacccgaccgaatcgcgtcagcggccagccagtcgtcacgtcgttggacgaaggtagagcgctacgtcttgcatgtcagcaagagcatttcctcaaattggcgcatgtttcgcatccgtggtcgacttctcgactggatgtcaattcgattccccttccctcaagcgagcaggtgcatgatcaatctttgtttcgggagcgtcaagcagtctgattcgtggcggcatgggttgacctaggcagagcgggctatcatattgtgcactctcagttgccttacttgcctatgcctccccccggtatttgtgacaggtcgctcatgcaccaccaacgccgatcgaaacaaggactatagccctcaacagaaaacgataaaaaagatgaacagaccgagacctataatcggaagcagactgttagcgcgaagtcggtttcacgtgaaatcttggcagtcccgttcatcgatactaccgaaacatgttcgaaactgttgatgcaagccgcgggtttcatctctttgcatgtgatgagtcggagaggaattgtcataacgaagctccgagacaaagccgttgcccatgacatagcaaaaaaaaattcaattcagcacatgcgatcggaagggacgtccgctccttaatacggtacaacgcgtatcttgaggcgtcgctctacagcttataagggttcctgaaaatcttgccttgactggcctcgactctcgagcagaccttcttcgattgtatcgactatgaatcggcgccgatttccaagtcgtcacgaccatgggctacgccgtacggcgcacctggagggcaaccagagatgacctcctccagagaaatcgcaatcgtaacaatttgggattctgctcatcctggcggatcccgctttgatgaccggggtttgcgataagcgggacagcccaatcttttccgtttatacagagcactaagctctgtcaggacccccgtgtatgcatgttccttcgaaaatagccgcaagaacatgccgactcggctgggaaccaagggtgggtcccatgcgacgatcttctgcttcttcaaggagctggaatgagggtaccggatgagtcgatgccatagcaaaagaaaagaggccggctatcacagcgacgaaggcaaagtactgacgacagtgtccacgtgagcgaacatcgaaaagcacatatcaatattgatatagtaagtttcccggtcagattagtccagcctgtaaacttacgcgtcacaactactcgtgcggcagcaaagtcgcaacatggaaagtagtgacattgaagttcccatctgccttcaccctgccctaacgagtcaatgatatacagcaagacttatgggtgtgacacggggctagtcggcaatgacgtaggcaacggacagtatggttaggaacgtagttcgctccaccaaacctgatcacaagaggatcttcaacgcttcttcgggttcagcaaagacgagcgcgatcagagggctaacgaaaactttcagcgagtgtcgagtggacatgattctacagagcttgagccagcacttcgattcaaagaaaggggtcaaccgtctgtacaggcgaaaccgaaacgcgtgcgaaggagcgacctgaagtgtattttcgtctttcgtactggaacactcggtacaaagccacaatcgcaagtcttctcgtattaactacgaaaaattcactgttgagagcgtttgccaacactagaggactgactgacgccacgccacaatctctgccgtgaaaactgtcaaaaagccttacctggtcgcgaattatctcgcatttgacttggttacactggaagaggcaccgggtacgtcactgatggcatcgtttgcttgctctcattccttcttgccgctagcatatgtctcctccaggctccataggagaggggtcgagtttgaaaccaggccggcgtggaggatggtccagaagtctgaatcactaccaaactgggtcctgcagtaagcctagatcattccattcagatcgtgacccgttcggccagactgtcgtgttgagcggttcgatggtgtcgaggcaatagagagcataggaacctgcgggagacatagacatatgttaagtgttcgaccgcttgggatctgtagcctggcggatagcgcatctatcgcacctggtccgggttgttggcgcgaacgtgcatgaatctcagtatatgctcatacgcaggtgaatatttctcccccatatggaatttcatacagggccagaaccaatcaggtaggctttctccggaagagagtttggccagtccatcgatgttaaactttcggatctccagctttggccattcctcattgtcgcaaatgtagcaagtgtgtgtaggtggatgatgatgctaaccatgagaaatgcatgttcaacccctttctcggctgatcttatactcgtgactgagttcggaaaaagatgctgtggccagagtttcgccattaccgatcaaaggaattcctggggacgatcgattcttccggcgatacatcagctgaccgtagctgacgtagcccttgtgatgaagcctatatcaaggatgctgatcgaaggcggctgttagtatgaggcgagacaggctctgggtaccacgtgatcgtcatgtcatggtcgacaaccctttaatcgttttcctacgttgtagtgtctggcttcagtcagcccaccgggctattgcccataatcccaagctcttcacgtgccgaagtggtgtttttgtaactccccatgtgattgcgttgtctcgccacgactccctcgacatgcacttttcgactctgaaacgcctcggctcggctccgtgatgtgtggatgatgacgcatcagagggttagttgttgggacatcgtcaacccacctgtcatcgtcttttcgggatccgattgaaagagacaccctgttatagccagtcttcgaggcgacaatccgatcatactatcgcattggaggtagccatgaaaatttcacagaccaagatcgccctgaccggctgcatctgaccacggtagaatcgtcatcgcagtgatatcgggcgaccatgacggaccgattctcccaccccctctcgatccagccgacagccacacagagatcaaggcagtctcccaatagagctagcatatcttctagagcttctggttctcggaatccgagcgaaaccggtcgacctagaggttctcggaccgagccacctgtcgtcactacgtcgaatcccagcgatcaactgcaggacgatgtcaaccgcgaccgcctaccacaaaatcgatcaagagcctcgaccacagctagatcacggataccgctggctctttctggcattggacgtgaagaacttgacatctatcatgtccggtgggacctgctcgacgatgatgaattggcacgagcgtgcggaacaatcacctcgtcgtcatccccctcgcctttccaccggacacagccacttcccattgacgctcggggtgaccactcgcctcaatttacctctgatggcggtcccggctcccctcgtctttcaaggtcttcctcttcgatttcctcgttgacgactcctaaaacacgaccccgcccgctcaaacggttctccactcaaatcctcgctctgacggtccctcaacttgagggtcaaagatcagaacaatcgacccctcatcaacgatcggagggtatctttccacctagtccaccagctacgctccccgaattcggtagacgaggagaagatcgggtctcggcggacgaggcagacgcaggggtggagcatacctctccacctcggccggtacaaccacacctacatcccctccgcgtgctatcccgcttatcgagggaactaggcgagacctgtctcaagctagaagaggagaaccaagctctccggtcgagtctcgctggaccgtcgaggttagggcaggatgacgttcagccggacgtaacaccaggtgcgcacacaggtacgggatcaggcgggattgcgacccctcgaagaggttcaaccgggcagaggacgactgcagaaaggtctgatattgaagcgagaagagaagcagaggataaacgactgtccagcctgttcagggaagaagaccaggtgcgttcctacagtgactacggttgacaatgctctttcagaggacgattcgctgatcacgcatcgtacaaccacgaccttgcagctctccattcatgattctctctcagaggctctgtcgacacatctcacctcgccgaccgtatccaccttctcgttcaaccagggccatcaccgccaaagccagggagacccgctcagtgccgatcaaatcggggaggacgatctacaagcgaccgtccgggtgcgatcaaaccactatgccccggactcgccatcacgttccccgtctttgactcctgtttggatcaatgcgcaacagcagagccatcgtgcccggtcggggagcagttcgacacaagcttccatggcgcaaccaggtcgaacgcccacgatcgttgttcgatcgaccaccgctgacgggacgatttttgccagcgaggaggccgtcgccgatgacgatctgctcggaagcagcgtaccacagccgaaagacaagcatcaccgatcgagctggacggatagcctttggggttggacgggcagtgcgccgcggcgcaaagactcgtcgcggaagaatggcaaacaacgagttcaaggtgcagaaagttcaggcaagggaagcaagcaattccagcctagccgaccacgtgcgtcgaccacgacttccgagactgcagcgattgggaagcctgttctttcgcctccgatcttgcccgagcctgagggcgacgacggagaggaccacacctttcgctatggagatcgcagcaacactccttcattccgagccatctttctcgccacgcgacttttgacacctgacatgtcctcgattctcagtacagcaagcaaaaagcggttgcaaggcgagacgctaagtcgaatggcatatagcttggtccggaatagcagggatacgggaatcaccttgcggtcccagccaaccattgcgaggcttggcagagacgatcaccgtgaaccagtaaacacaaagtcgcttactaagagatccaagcgacattccgtgctcggccttccttcttctctgggtaacgctctcgccagtcccgttcaagcgtttctggcaagtgggtcgtccgtcccgacccaagcgacagaaggagaaacagctcggaaacagctgcttcgtagtatctccagccgagacatggcaggcacattggcgacccccgggatacccgtcagcaagggcaaaagtcctgaccgctccgccatgtcaaccccgattgttagccccggcgagcacgacggagaatccaccccgcctctggtcgagatggatgcattcatcgccgacaaagacaagccaccgaccatgctgccaagacgcaacacaatgcacaacttgcacagcgaaacctcgccctcgctcaagctcgcttcgcggtttggtgacgagagcgccgagttggcaccttataccgacaagtttggattcgtttacgatctccgctatgtccgaatgttgctcgatctcaaggctgcgtcggaagaggacacgctcgcaaacatggctccggaagaagatgagatgcctcgcgtcaagagggacccacgggcttcgttcgacgagcacgccttggaaagggtcaaatcggacgtcagctttcaatcgaattcgtcccccggatccgtctgtatgcctctgcccgagtcgtgcgggaccattgtatcgaatggccaaactcctcatcgacctcgctcgtccacactcgccgtcttcagtccctcacccgcaaaaccgagcgcttcgcaccaggacgtcacggtatccagccgtggggcattcaatctccgacccaccatcactgcgaatgggggccggaaagactcggtccgactgcaaaaggccaaactcgactctctggcagtacgccaccgtaagccggtgtcggctctcctggaccagctcggtgaggtccaggatgtgcgggaagcagaaactgctcgtcagtgggaacagttcatcaaatatcggcgggggaaaacctcttctcgcaaaggaagcgtatcggccaagcacaaatcgctgcccggacttgatcacgcatcttggcaagatgacttggtcggaattgccaatattggtgacggcaaaaccggacaagaagtcatgaagcgattcaaaacactcatcgtgtcttctggtatacctatcaatctgcgcgccagcatctgggcggaatgctcaggcgccaaagacgctttcatcccaggcgaataccacgagatactctcggtgcacaagcacgacgagcatccggtgcttggggacatcgaaaaggatgtcaagtgagtgtggcggccgtgtacgcgactcggcgacatcatactgattgaatgccccaggcggacgtttcccaccaatgtctttttcggtggtgatggcgtcggctgcgagaagctcagacgactgctcactgcctatgcttggcacgatccatcgatcggatactgtcaaggtatgaatctagtcgccgcgactctcctcctcatctacgaagacgaggaacgcgcctattggacctttgtctgcctgatccgcaacctactccctcgagattggttcacgtcgactctacaaggcagcatgaccgagcaggccgttctcggcgagttggtcgcggaaaccctacccaaaattaaccggcatttcgaggaactcgggctcgatttgtctgctgtcacgttcggctggatgttgagcttgttcaccagctgtttgccgattgaagtacgtcggcgcggtttgttttggggtgagcgatgactgacacgcgcaactcgctcagacggtcttgcgcatctgggactgcttcatgattgaaggcaaagacgtcatcatcttgtctgcgctcgctattctcaagactggccaggcgggcatcctcgagtgcgacaacgtgggagacttgttcgactacctgaacgcgattacagaacgactgtggagtccggacaaactcgtccaggcaagtctggctgagtgcatccgagtggatcgaaaagttgaccacctcttctcggacacggtcagcttcaaaacaacttgaaaacgacctttacccctgacgatctcgccactagacggcaaaaacacggcgacggaacaactttggcttctacgtaaacgacaggacgaaaattgtgatgaccctgagactagccgaaatatcattatgctggttgtaactagatgtcaacaaaggtacatgccgtccgatcttatgacggtagtagattaatacgaatacgaatacgcgacccaaatcttctatgttgtaacgcctcctcggtatgaggggatggctccattgaacgaaggcacgttacggacaggtggagtcggcgtggtcatcggctggggcagcggaccccggttctgtgtcgtgctgggaggcaagttcctattcggggtggcggcggcggaagtgaagggaacctcgcgacgtttcgggatagacggctcatcccgggtgctggctgtgtaattctcagccattgccttaggccgcgccgggtccagagtccctcggtatactgccccaggcgtcgagacgagtgtctgggcgagttcagctgcgtgagggagatgcgggtgtaatctacgaggaagaaccgcccgcgggcggacctttgaggcgagttcgagcagattggtagaaacacgggaggctgcatgttccatggggatcgtgagcttgagcttcccgtggtacgcgacagatcatcaaacttaccaagcacatgctcttctggatccgttaccgtgcgctcgttgcggcgaaggcgggcttcttgacgacgcgctaaggcttgaaggagttgaccattctcttgtagtttagttgtcgccgtgtacgattccgattgcgtccgctcgatcgcgccaagcagctccggatcgatagcactatcgggtatgccatctcccaccaatactcttgctgccctcagcgccctttcctgagcttcaatttcgagcatcgcttcggtggattccaccttgatagtcgatgtcgacgcatagttgctgttccaccccgactcgatccacgcccgactgctagcggcagcgtagatcgtgtcgacggtatcatcgtagttccagccgccgctgctcatcgtcgagtcgtacgtcggtccgaacgatggggtaaacgagtggtaatgcgacaagaagccaactgtcacgccgtccccgtcaacaacgcgccgtcgatttgcgcgatggtgagcttcgactcaccaggtcgacctgcgggcaaggtctcgcgtcgcttgtctttatatcgcttcaacttttgactagcgttcgcgtacaacgtctttccaagctttggtccccgcgcacgctgagtgtcctcgttctgcctgtcaggtggaccaactacagctggcttgccgagagctaggaaacgaagccaaacttagtctcgagaccgttgcacacagcacagcgacatggctcaccgagatacccctcgacctgcagtctggtcagacctcccacgtcctcgtcgccttcatctcctaatttgactgctcccccagtcgcctgctctacatcttccatcttgccattcttcgtggtcgctacgctggtgaaccaatccaaatgtaccctatcggtgggtacgacgacgggggccttctcacccctggccaccggtctcggaggcatgggccagggcactgtcgtccgctgatgcagtgcccacctgtgtttcggtacgggtgcgggcaaagctgtcgattcgccagggatgagagcgagtacaacgtccttgaccgcttgcaagtgttcatatatgggcatttccttttcctgcttgatcttggatcctagcaagcgggtcgctaccgccgtgggttccgggatgggcgtggagatgtttccctttgtgctgatctcggcgaacgggttgggcaggttggtcgggggtaacagagtgacagccaaacttgacaacgagtcctggtgacatgtcgatccgaatcagctttgccgtcgcgctgcagatctcgcaatctcggtacttaccaagaacctttccaccgtgacctcctcttccttggtcaacaagaatttcctcaaggtcgtctccctcgcctttcccgccgtgccattctcaagcttgacatcaccctcctgttctgcctgactttttggagaagggccaaagttgaaaggggcgtctacgaccttaaccagccgggtcctaactttgggatgcgagtcgcctgccgatggcacatcgatcggctgagtctccatcctacaaaaccccggccatacgtgagatcagcctcaaccaaacctcgcttgaggacctccaccatcccacactcacgcgataagaacacccaatatctctctcttcttcttcctgcccaaaacacccggcttgagttcttcttccatctcgtcatcgagcagatccatcttgaacgacctcgctccgtcctccttctcgtcgtggtcctgcttgcccgttcgatcgttcgtcggcttgttcttgatcctcgtagacgtcctcgccgcggccgtactggttcttcttccgttgagaccgagcatactgctttgttgctgagggtcttcctcgtcaggtagagccgaggctgaacctcgagtactcctcgtcgagttcgagtcgtgctcttgttttttggcgttaggagagacggaagtgtcgacccggttgtcgtttgatggggagagcggattggatgatttcgagagttgagatcgggtacgtttggctggggagatttctagaccgttggaaggatccggggattctaagttacacacgggattcgagacgagcaaatgttcaaggtatcgtcagcacgcagttgaatgtcgaattggtagacgagacgcgagacctacttcttttcagaggcgaagtcagatccatatcgacatccgctgcattgatttggtcttcctgttgtgccgaacctgctcgacctgatcgagttccgcgagccatggttattgtggtcggcgatgcaagaagtttgtctgatgtcgcgtcaggcccgtcctgtgatgctgagctgatgatgatcctgcgaaagtaggtacgatctacgaaaccagctatatcagtctgcagtgacgtccttcactgctgctatgtcactgtttctgctgggtgtagcggtgccgtcggtaggtctcctctgatcgatccggtctgctcttaggtagacaattgttgaaccctttcacaagtgagtcgcgcaacaaacgcgaaagcgaacgactttgacagatatcgcgtccgacggagggtaacgacagcaccggtcagcagacgtttcagcggggtgatcaaggcgtgttatccagatttattggagtgaacaagatcaagagtgttgcgaatagctcttggtgaggacgaacaagcccttcctgaatacccttgtcagcttgtccctttgccctcggatccgaccgtcaccctggggagaacaagcgcaaaagtgcgcttctaattggctggtcatcgatgaactggatgggtatcgtaaactagcgtataattctcctctacgatacagcttcactcctgctcttgatattataaagcgaatcgattcctctcaagcacactcctgatgtcagcagtgaaccctttgacggcggacacgacctgacctggccgacgtcggaacgcgcgcgtctcaacttctccccgcttgcccaaacctacccaaccaccacttttccttttccctcctcttctcagagctgctcaggctacccgatcgatcgcgcggaaacttgggaggtaacaaaggttcgcctacatgctcgtctccagaggtcgaccttggtctcggaggcggcgtcgagggtagcgtgtgcggcacttcaccaacccgtccagtggtagcaggtggaggcgtatctgtccttgggatgaaccccgctagcgcgtctggcgtattgaccaattgcggcattgaccgtctggagcgagaacaggagtatcattctggctgtgagtatttaagtttgatggtccgactgcaacgttcgttgactcactttcctcgagcagccgctacgctatacagcccggtggcgactcccagactttctccgctaatagagctaccaagcgtgcctaccgacgctttcgacacagatgcggtatgattagacgaagacttcgaactgttggcttgtaccgaggccgcttgactagaagcctgagctggagagtaaggcgaacctgtaacgaagagcgcggactaatttgggggggaaagatcagcgataaaccgagtacccgggcttgtgaccggaatgaaatcatcgcctgcactcacagtcttgcgcatatcccctggggtcctcaatatttcgttaccagattcgactggaatgacccccccgaactctccgactcttgctgccgatccattcgacccggttctcatcttttccccgcctcgatttgcgggcgtgacgactcttgccctctcccctctaccatttttcacgccaaacgtctctccactcccatcctcttcactcaagacgccctcactgagctcttttctcccggtctggccgctttcctgcgtctccccgctggactcttgtcggtcccgcctgtcgccttcaggtatgccgctcaagaaggcttcccggtagacgtcctctccgaccaagggttgtcctgcatagctagtcctatctctcccggccgacaagcttataggtcgccttcccgtcgacggtggctcttcctcggtaaggctcgaaacgacactggatcgtttggccccgaacagagatgagatggaccccgcgatcagggaaaagcggttcggcgcggtatatgctgaaggcgagtctatcgagattggagacgggagtgcgctgagtgggaccgggcggggtcgacgtgaaccggtttctgctgcaccctcgtacgcgttttcacctgaggcgatcatatgaattggtgggtgcctgagcggctgcgattctagccccgagatcagaccactacgagagggatcggcgtcgggttgatctgggaatgtgatgccacgaccgtgttcgtcgaccccgccaatcacatgatcgtgttcttcgtcgacggcgttcgtgcttgatctcgatcggtgagttagagtgttcgcttgatcatacaacgaatggtagctaggaattgaatgcagtcagacaaccatcgccatcatcgatcaagaacagaaagctcacctggtccccgatgtctcagctgacgcgcttcgtgatctgtctctcgtgatacctgcagctacttccgacgtcaatctttcctcactccgatccggcgggactggaaatctcatctgacttgtcgcgaacctgtaagaattcggtgttctcgctccttcatcttgcaagtgattcaagctgccaccgagtgccgatcctaagccgcccgcgagacccagaccggccaggtcctgctcgtcgataggctgtcctctatgggccggagttcgactagatgcgctcccattcccactggcactcgagtatccttctgcatatagggtagagaatcgcgatccactccccgtcctcggcgaatcgtctctgatttccgcttcatccgctactccagagtctaccctgtccctactacgcgagcctgacgcttcagcagggtacgagtagaacaggtcccgatcattgcccattatggaaggaatcgagtcgctcttgacatgccccgttgtcgctgaggttgtggtttcacgagtatcttttttcgcagccgtgcccactggaaagaaaccttgcctggatgacggagtggaagagtctgtctgactgattttggcctgtctactagacggaggtgttgagtcttcgcccggacccgaccgagccgctccaattcccagggctgccatgaacttgcccttaccggccgttggagtccttgtcggagtatcttctcccatcgtaggtaacaactcgttcagctcttccctcgtatcgtctatccctctccttcctgtgtgtacgctcgtctgatccggctgtgctgttctcggtgtgcgattctggtccccttgagctcctccgccaggcaaatcgaccatctcatagccgtcgtcattagacgcatccccccagacattggtgcttggcacccggttgttatgtttcattctggctgaagtcgatcgttggcgcagtccacttgcggctaatatcgctatttcacatacggtaccataatttatcagtatctcttacacacgaaccggcacagaacacagccgaattactaggcaaccacctgtttccttttcctccctccgctgcagtgacatcatcttgaccttccctgacaactgtctgtccagcggtgctgccactgcctcctccagaacccaatgcggggcttctccctgcgaccgcgtcgtagcccctcctgcgtctccgcctccacagaaataacccgagcagtatgccggtaaaagccaatatagtgaaaacgatcgccaagaccaaggaagcagtgggaattccatcctgatcggaggtaccgcttgtagctgggctggcggtagttgctaccggaaccgctgacgaggaggaagcggatgatgcagtcgttgatgctgatgaccgtgctatcgacattgatgcggaggtcgacgatccaattgcgcctgtttctaatggtgcagaggatgcacccgagttggaagtgtcttcggtattcgatgtctgagcgtcgtcggccgtgctgactatggctgacgcggtcgtcgtaggcgagatcgatcccccaaacgtccacccttcacccaacggtattgatgggccataatctgatgatcccaatttaagtgaaatatcagcgacatggcatttgacattccggaagagctcgcctcacaaacttgaggtaattgaacgaccgattgaatggtatacaccgtattccctatcgtcgtgacgtactagtcgaccgtgatcgagtgtttgttcatcgatcatcaacatccccatgaaaatcgaccgcttcgttctggatccctcaccgtcgaataagattgccactccggtaacgcctgtgggtttgaaactgacggatcataggttatgagtagctgaacgagtctgaatgcgctcgggacgtcctttgatgcgtgacttaccatacgtcaccgtgatcaagtcagccattctgctacaccacccgacccggttgcacctggcgggagacgaaactatcggactccttctcagatttatcgatctctcaagtctcggcaaaattgataacaacacgttgcatgctgacggtatggtcccatcagtgtcttgacgacttgtatgttttcgagttttgtgtcgtcttgtctttatctctcttttgttccgacgtttgagactgaacaatttgattccgggcattacatccgcttatgaatcgaatgcttccgatatgcgaaacctaatcacgtgactgatccgatgagaccgtacgtacaagtgagtctttgtttcagggccaaggcttgaccaggtcgaccagaatgccttggggtttagccaatgcggtccgatacgagacgagcatttcgtcatgaatgaaacggttcgagcgattgattgcgtcagtcgtgagtgtccggcattaccagcaccgatacatgacgctatcacaaaggaacggtcgcgctagtcgaactcagcctttatatcacatacttgggtcaagctctgatataataaccgtctactctcggtctccagttcctatatcgtcttactgattgggaactgccaacatttcacgtcgggataattttgcgactcaatggataagtcgagcgcccactattcgacgattaggatggactcgactttcgatcggaggaaatacaaggataacttcgcgagctcaatcggtggaccaaagacatatcgatgggagtcatctaatggcctgattattttgacagagagaccgtcgcactcttccatggaagcctacactaaggactcgatgggacaggacagaagggccatttccttgtcaacgggcgattccaaccctgtgtccacgtgtatcgaatctcagcatcccactgacgtcgacgcagctcttgaacgaatatataggtgtctggatatgatgggaaattcgcctctggtcggtaaactaagagagcggaccacggcaataagcatgtacgctgctgctactgctgctgccgccgccagaattgagaggtcgttcaaaggattgctcgacacgcaggtggaccttcaagaatggcagaagctgcaacgggataacaaaacatatatcgacaagatagcgcagatgattgagactctgggggacacgattcaaattggcgattcctggccgatcctctgtctagcccgagcttacgccgtcaaccggaacgatgtgacagacgatcatttggcaggtttagtcaagtctactatccttaagcgtggaacgtagcgttagcatcagtttattgtggcgtcgatatcattactataacatgatggaatcctttgaagctcgcaatcgtgtcacactttcgggtgatagcacagagcaatttgactcaaaagaaaattatcgtaactcgagccagcagcaagaaagcagtgacggtcagctgaccaggagattcatgccttgaaatggtatattttccagattgtactccgagtgcccctgccatacaaatatgccacacagctgggcaagggtaaacctggcttcaatctggaacacgacaatttgagcattcgctcaggtagtacgatacgggcatgccgaccgggtgtacgagccataaacgtggtgaaagtatgaccccattcaattcgatgagactctagcactaagtgaccgtagctgtcgtcctgaagagaccacaccgccatcagccttttcgatccggtttcaacggtcggtagagaatcggattctacctcctcctttcttggtgtcaatttccttcttcttttgcttgttctcactctagtaacacggaaagctctgatagatccagccttgtatcactcgttaggcttcctctcgacatgcactgatcaaaggaagtatgcacccagcgaccaatctatcgctacatagtgatattcgtgaacataaatagcttcccattccatcgttgggaggggttcgaatttcagtttgttaacatcactactactatcatgcagtcaactcaaacgatgacttcagcatgagcgatcttgccacgaccttttccctcacggcgccgtcccaacaagatcaacaacactttacagatacgaacgctaccattcatgggtctttccaagtatcgaatgacactgcacacagttgaaccaccgaatcgaccgatggtaccaccctcacaattcactattgccggaatggcagggtacgatgggcgcacgtgcattcatctgcacttggtttctcctcgacgaccggtctgcaagatccgggtcaaaaggtttacaccgacatttgggataaccagggcgcgcaggtcacttcgctgaacacacaaccagtcttgacattgaagcctcaaggcggatttctcaaaattgagcagatacagcatctttatacaggagaacaggtaaatgccatcggtcttgcacagagcatcgtcggaactctttttccagagaacgcggcgaggcatgttaatcagttggacatctacaaggacaactttgtgatccagatgaatatcgaacagatattgttcgacaagcttactaccaatttaaggggcaacttttctccactcgtcggtatgatagatgaacagctccaactgatcgaatttcctcagtccaagagacctgttcctttcaacggcagcaaaagtaccagattcccaccctgggcaatccatcgatgggctgccagtcgggtctccgacgcgagacttctgacaagtttggagaaataagggtttcgatatttaggaaaggtcatgatgtattatatcgcagattcttgggcggccaggggtagcaaggagacaagcaagtacatccgccttttatatggcccacagggctcccaaagaccaaggagaggaggctaaattgttatagcgaccgaagtgaaagcgctcaaatcaggcaacaaggtctacgtctccggatgacgtccgaatccctctgtcactcgatgtaagatgtaactactttttgaaaggatctagcgtaatacaatgtagtcttccctttgaatctcgatgccaggaacacacggaaggttcacaagacgacataactctacacgagcccgagaagataccgcggacgactgtctacgcataaacttcgagcgttcagtcagatacgaccaaccggtacgacgtctaaaaatacactccagcttttgacccgagtcagttcagaaaggtcggaatggccgaggaggtggggtgaattcggcgattttgacctaatatcaagctcaagcagtagcactattattctctttttccaggcgagacgatgttttcggtcatgccgggccaagcacgttcttccgtagcagaccattcctgattgtcctttaagaagcagcgaccaaaacagattagcgagaagctcgcggcgatatcgttctcaagatgctccgcgatgccgggctgagcgatatatgagggaacacccaggtctcatgtcgaaatacgccatataatgctgtgttcctccccaacacaccactcatcagattgacatggcaccatccactgtttcaaacgttgaattaagcaggacagaagatcactgggcctggtcccgcggttcaggacatgtcacggattatcttaatcccgaatttccctccacacaggtctccgtagcgtcattttcagttcattgcacttttgcaggagatgaaccgaggtcgattacgcactcgggaaccctcgatcaagcgacattagttcaagcacagagtgccgagacgatcccgtggcagggcctgcatgcgcgagatagggtcagagtcatcggaaagttgctcgcgcgcaagcttcagatcgagaccgcttaccagcagctagtcgcggcccaaacggctggcccagaagtagaggcggatccggcgatcgttcatgggctgcgagaaagcctcgtttcaagaggtctccatgccgaggaggcagacgtgagacttctcgcgccggccatcttcgatgaaagtctacgccacgatatcaggggcgtcgactttgacatgtttgccgatatcattgcgcagagcaagactagtgtggcagaagaaagcttccggcagaggggtccacagaagcagactcaggtagagatagggagatcaagaacgggagggatgaccgggcgatcgttgctatgccggcccgagaatcctctcacttgaactcgacaaaggaaggcgcgtgacaagaactcgacgatagtagaatacatacgatatggaccagactaccctaagtttgtgctgctgtgcccgcgtatgaccaccgatatgacccgagctagtgccgatctgatgaattgaatgactcagtgcagattgagcagatcaattgatcagggtgcgagtttgtatgatcatgcgcgcttgcgccttgcttcgtgacctgagcacgtgacgcgggctgtgtttcgtgccaaatcttgggatggtcatcctttgatgattgagtgtctcctgcgctcctgcacaggtcgacgacacgagctttgtgcgagcgcgccatgccaaatacaaagtgacataaaccgtggtaggcactcccaaattgataaagcgggagggtacgctcatccagaggcgatgaccagggcactgctcgaccttcagctcgacgaccgcgcgtcaacgccattgtcgatagcatcctgcggtccaagcttgattgtagccgacaagatgacaggaaactcagagctagataccatgctatcgatcttcgcactaagcgctcagagtccacaacgacagaagacgctggagggcattgtcaacaggtatcgtgtccttgccaatggaactggtccacacgaaaggtcaggcgagttgatggacgaacaagcccaatcagtctacgaggctatgcagcgcggctttcagaaaatatcaatggctttcaaggactcgccggagatgcacaggctagctaaagctgcaagtcaggaaggcactttggttgaactcgatccggaggcatacgttttcttggccaatcgatgtctcgctatgagcggagggacgccagcttccaaactctcgggtcgttgggttgttcagaatgcttactagcctattcagattctttttgtactatcgtataccatctatttcgctcggcctatgtcttgaccggcgaactcatggtctcgatatcgctgaacaatttgactgctgctcctcaatctaaggtgcgacgaaacggtgtaccttgcagagggcatcggaatcagcccgctttggatcaacgttttcctttcaactgagctctgtctactacagtaggacttgtgttgtccatatcgtgtcagggacaaccatacgattagtatatccggctcgtgtacttgaaggcgatcttcactgctgtacccggccttgatactcttcgatcttacgcatgaaatctttgtgccattctcggtcttccctcttcctggcggagattggcgttcttgccatctctgcatgaccggtcggccttttagcttgtcgttttggcagctgttttcttctcagtggttctcccttcgataggaaagatgccatgataactgatggctccagatagtcatccggggccatggaagaatcgcttcggccgcatgaggcccggccgatttccgtacacgcatgactagtcgaacttgcgcgggtacacttcgtagcctcatagctgattgaagttccatccgatacgcgtgagagccaatcctgtatcacccgatgtaggtcagattcgtattgatctgagatctccatgagatcctttgagctgttccgtccaaatatacgagcacaacggcaaggaagaaagaaaccatcggccgagctctttcagtgtatcgagtacatcatttgggggatgatatacgttccgggcaagcctaaacggagctgaccgggagatgtcgctacttgaaacaaaaatgacgtaacaagccctcgatcaaaggagaggtcaggcctataggagattggtcaagctgggctgtatttgtcgtcagtccaatgtgagtatcgaaagcaggtcacgatttactttcatctccttcacaagatcggactcctcaaccctctcatagaaaatatccaggtcatgcctaacaagacatgtgaggcacttgtagcccaatcatccgaccagatcgtcaaagattgttttccacgcaactgtcttgtcatgtaagaacgattttgcatggataggtctatcggcgcggcgcataaaaccccactggttttcgctatcgatttctctcaatgaacgggggctggctcagctccgcaatgaggagtgaaaccgaaaccgtcaaaagaatgttcgaattagcggctgaatttagtgatcaaccaggggcaaggagtttggtccgtatatccaaatatccagatcagtgtatgaagaccatgcgacattggataagcacgtcttcaggaaatacggtctctcggttacagaaatcttttcccaaaactgaagagatatcaaacgtatgtgtccaaatacatacccgtgagccatcgcggaatttatcatccctcctgtacaagtttgatgtattccttcaggcggtcattcaatttctgtatcttatccaaatccagttcaagcgtcacgatcacctgagagagccggttgatcatttcctttcgagcctggagttcgcttccggagacaggcttatcgtcgtcacggtacagtaacgttattctcgcttgccagattcgcgcatcgtcctctaggtaatcgttataatctgtctccttgtacgcgttgattatccgcttcctctcctgattctcggaatcgactgctgcctgttcgggggtccccttttcatggtttgagctccgttggtcacgctcgatcatatctcgaaggactgctatcgatcgttggactaaactgttgatctcgtcatcaattccagtgacctgacttagtttgtcgattgttgctgagggattgaagctcgacttgaccgtgatggtgattctgtctacgtcgagttgaagcgcgatatcgacctctggcctgtcggtatcctcctggccgaatggtttgagcttttctttctcaacggtcattctggagtgtatctcgttgccaacaaaaacaaatttgtcggtcaattcattccagaagtactccaactttgtggcactatcggcgtccatagttcgaaaattggattccctctcattgagggtaaaagtgtcttccataatcatgaaggatgtatgtcaagtgtcagtgagatgggtgtgatacaaaacaggtcggccgtgacatgtcttggtatgcttggaaatgtagtgactttatgtgattcaagttggaagtgaagaagctagtagcctagcgaaatctcggctccatgacgtacactgaaagggaaacagatcgcgttgatgcttcgcggttgtgatcatcggcgcgataccgtatgacacctatcgttgactgcctgtaacaaaggtaggctcgaggtagcaagccggcggaacactagtacggttgctgagatgccgatttcatgacgtgctggagatggcttgtccggccgtcagcgatagcactaggccagggcagcgccgagtcggggctgcgccaacacagtataccattgcacaggagttagatgagacacccgtggatacgcatttatattcgccatactacgtcattcctggctcatcctgcccgccatcttcttcatcgtcacttaatcccaatattcgcctgcaccgctgtacctccgccttgtcccccgtccatttccctcggtcatcactgagcttgacgcagtccatcccgtccatcttgcgtagtttgatgaccatgttgagcggtttcgacttggcgtccgggttgtcgacagtgtgaaagtcgttagtgagatgtgtaccgataccgaacgatgctaatcagggtcacgaagttcagcgcggttgacgactcgaagatcacgtcgtcctgggctcaccgttgatcccgatggtttcgcactctttccagatcttcaacgcctcgtccacgtccagcccgtcactaaatatgaccctgcccttctttccctcctcctcgcctcgctttctagcgatctcgtcccacgtcctcctggcctgtcgagcgaactcgaccggatctccgctatcatgtcggagcgcgttccatctcgatgctcgcgaggggtcggacaagaattcccggaaaaacacgtcgaccgtgtacgtgtctgtcaacatcgtgtgcaatggggacgttgccgaagccgggtagactggagcccgggggtgcctgttagttccttgtgggtatatgccttgaggaggggggaggtcgctcgctcacctttctcccacatgtccatagcggtcccgttgggcgacacgtaatcctgtttggcgcctacagccatgatccattcatgtgcgatcgtccctaccggcttcattccgaacgtcatcgcaaaatgtacctgcgatgatcgccgccgtcgattcagctcgatatgctcgcgtcgaaatgagaaagcccactagaacttggtgctcacgttgctcgtcccgctgagtccacccggcttgccctgcctcccgccgacctctttccaatacttctcttccccctccctcgacccttcgaggatctgcttttgaacgcgataactccttctcctcctcgttccaaactcgctgtacacaaggttgcctgacgactcgctcaaaaggcggtaggctttggatgctgcgagattacgggtcgaagtagggtcgtctgtccattcggcgggaactgtatggagaaagtatccctcggagactgtcgtcattaggtccggattagcttcaagtgagtgaacgggatatcaactagtaagcgcggatagcagactcacggatagccataaggggtacctcgtacaatatacactccctccacaatccctttacgccgagctcgatcaatcccagatcatccgaatcgtcctcccttttctctttgacgacgaattcgagctgaacctgttcatccgggtggagcgtcaggttttctaggtaatccaggtatgattgttggaagtaaggacatgtctgtgagaggtactgtctttcctcctctgtgagactcagggttttcaagtctacccagacattaaagcagcgtatcagccccgaatcacctcaacatcattacggctcgggacaacacgccgtgacccaccatccggactcactcgtgacctgttcctgtacccacccgaacgtcttcctgctgaataacatgtccggtgaacggttcgtaaacctgtactccgaggtggatccgtggaagagctgaaagacggcattttgcatggtcaattctagcccggggatgagcggtatctatcgtcagcgggtgaggagtatgggttgacatttcgctagggggacacgggctcactgtagaggtcggtatcgaggatactgaatgggacgaggtccgactcgctctcgggctggttggccgacgatcgtgtcattctgagccggtgcaagtcaagtcgattggtcttttggtctcccaatattcactttgtgtagagatagagcgaaagaggtgtgcgttgggtctgtatggatgacaagtagagtagtgtatcgagtgaacaagtttgtggttttgggtccaacggtcgagtcctagctcgctcgggatcaaccaaagatgacgaaatcgaccgagatggtcatgggctggtagagggggaagaaagggtcatcgatatcgtatgttatagcactaaataccgatgtaatctgacagggtggtagatatgattgaaccatacactcctgtcaaatttaaatcgatattgaattcctacggttgctattggaagcttttcccttgtttcactaaaatatttcgattttctggctcccagctttcctgctactaaccctgcccgtcacatcgacttcaaaagttgacaaacgacttttccaaagagactcccgtacttacaacaacccctcttgatccccatacacccgtacgactcctccatcgacgagccaacaatgtccctcttctcttcatcactcgcacccgcgtcctcggtggtgacgggcgctccgatcagttcgaacccgttcagcgtctcttccccctcgaacgctcaattcggtgacaagaaacgtaaacgacctcgagaatcagatgccacacggtcgaacgccccccacgttgagacgcctatcaagaagggcaattcaaccggcggcggcggggctgccaaggatgcttatcagcaacgcaacgatatcgtcgccgcgcaagccaacctcgaaaagttgatgaaaaaagtcgggatgacgggtacacctgatctctcctctccctcttccactggccataccgacgtcaatggcaagcccaactcgaattcgcggcccgtacctacttcgaggcgaaatcgacatacccccaagaccggcgaatcggatgatcacgccccaggcgcacggggagctttctctgatgaggatgccgaggggatggggggtgatactccggtcaagaaacgtaaagtcaagcacgggctggacggacgtccgacgggggccgcggcggggaagagtgatcctctggctgggttattgggaggcaaggggaagaaggagaagggtgctgcgaataagaaacagcagcaaccccagcaaccagagaaaaaggtcggtttgaccaagacgaaggcgcaggggacgccggtcaaggcgtcgactgtaggaccatctaccaaacctgagcaagaagaagagattatggacaaaactccagccgaggttgaggacgacaacgacagcgacgaagacgaggccgccgccgacgaggacctttccacctctgcccccgcccaacccttgacctcgctccaaaactcgttgacctccaagctatcgagcgccaagttccgttggttgaacgaacagctgtatacgacgcccagtggcaaggcctgggagttgatgcgtagcgagggcggtcgagcgtttgacgacgtgagtgtcaggcttacgatgtcgtccgcgaggcttcgatgtgtatcatgctcacctttcggggcgacgtcatatcacgtcccgtctcgcagtaccacaacgcgcaccgtcaacagacctcggcgtggccatccccacccctgcccttcatccaacgaaccatcctctcccaactcaaatcgggtgtactcccctcaggcgctttcatcatcgacctggggtgcggggatgccgaattggctcgcgacttgatgagctcggtcgagggtcgggaaaaagggatcaaggtagccagttacgatctcgtcgggaacatcgactgggtcgatcaggccaagtccagctctgcagtcgttgtcaccccgacgcaggaatcagcagattcgacgacgagtaaaggacgaggatgggttgtcccttcagactttctgagttgtatcccgcttcctggcaaccctggggggtccgacttgccgacgaccgctccagaacccgtagccctatctaaagccaagaaacgacggaacaaaaaagccggcgggtccgagttgccccctgttggacctgaattggtggacgtcgccgtctgctgtctgagtctgatggggatcaactgggtaggcggtgtgtacgaagtggcccgggttttgaaagaagggtgagtctcggcctcacgagaaacggtgacgagaaaagtcgaccgaggctgatccgcttgtcattcgtatgcgcagtggtctctactatgtcgccgaggtgacctcccgactcgttgacaagccaggcttcatcgccttgatctgctctttcggcttcgagctggtcgaacacgtgagtctatgcgcggttatttgccctagccctcactgagattgacgtctgccctttcgcagaaatcgcccacgacccacttcgacctgttcgagttccgcaagacgtcgaccttcccactcggcaaaatcaagggccaggagggatggttggaacgggttaagaagggggaaaaggttatgaaggggtgcgtctacaagaagcgatgagactgagactttggacaacgatggtccgggtcccccttctcgacgcgatcgagacgaccgatcggaatgtatgtggttgtagcaggacacatcttccacagactcgccatgcattgcagctcgcggttcggtagccagagacgcttgccaagtttctgctatgtcagggtacaacgtcttgcgccccatatgtgtgtgtgtgtgtgacaaagcgagcagcacgccatcctgtgaaatggagtcgcgaggcgcagttgatcttccttttatctgaggatgaaacacggccgtaagggaatcaccatgatcgcgctatataatccagccatcgacaaaccgcacagttcccgccgacacgatacctaagggtataccttctggtagaccgtcttcgtctttccctccttccctcacgaaggccgggtgttgtgtttattacgagatgagcgccacaggggacaatacgctcctgaggcacgacagtgtgacagattcctcggcactgtctcttggcaccgtgaccgattggaggccgagccatcttagttggcaatacactgcccttgaaaccttggaacaagaacccattcacacagcactcggcgactcgataattctgttcgcctgggcgctggacgactgtcatggggtgtctcttgctgaaaccgttactgaaatgctggatgagtttcaagttggcatatcggctggcgtaaaagctaccctcaaagcccgacctcttttgggaggtagaccagatcgccaacatgttgccatactgtcattggtcttggcgatgcgacgcggtgttgggcagcatgcccttaccatagacgacgcgaaacagttcggcagagcgatcgacgtggcactttggaaagaatttgccaaacaaaataagaagatggcagcattgaaatggtcgatggataagacagcgaaacagaatattttggatgacttgctacgttgttttgtcttggccgaggtcggaccaacagtcctccagaaagaggatttcagccggctggccctggcgatcgagggcagtcttatggatgactgggtcgactgggcagacgacgtcttcttcggtgatccaaacctgacgtgctccacagcagtcgtggaggaaacagtccttgatctagaactctaaaaaggtatctcaatacgttactcgtttacttgagggacatcaacacatgccaataaaagtcacaccatcgtcgtcccgtttcagcttttctacgagcaggattctcaagggcattaaatcccggacagtaatacttcacttgcaaaggacatttctgaaagttttagacagacttggcggcatcccgtgttgcaaaaagatgcattcaataccgtggctagcgtggtttacgtgcgtgtctgagccagctgttgtcgagagcaattccttggtcgtatcggatgatacgattgatgagatctatcctcatgtcacagcaatgagtcggagcgaggtcacgatgggctgcagtatctgttcgctcactgacgagctgagctactcattattctttgatacgccaatttccgacttcatcgatgccctagtcgatttgctcattgccatgtcgtgatcgaacacgctgagaacggaatgggcgctaacgacatgttgtcagcggacgctcgccttttcaacctaaggtttttcccttgcgaacccctattagagaccgcagacttaccgcggctgtgttctgagtatcaaaatgggagaatttgacgattgatgtgccgctcctttgtagtatgagcgggcagaatctccttatctcctaatgcggaacgccatcatcaaccacctccttgatagtcatttccgcggctgtttatttaaattaagtagcgcgcctgtctgttccccagtgtgggtatgccaccctcggttgaatgagttgtacacgaaatgagaagcagaaatgtgtttactccgctgggccgcaacggcgttgtgactacgacactgattagcggaatgtccgctgctcctatactacttatcgctttccagcaggcatcggccacaaccgctgaaacgatggcttgaattgatgaaaggatgtctgctcatagagtaaactgcatacaacgtgttctcaagtgatggatggagtaatctcggatcaagaagctaatcaagtactcttctctctcgcgtgcttgaattataatatgagatccacatatcaaggcagatgacaagttggaaatcgtgcttgcgcccccttcatgccacaataatgtcataatgttgaaccaggaatcataaggtcatcataccctgcgattgctctgaagagagacggaggtatctcctttgatatcgaacgatgatgccattcatcctttagatcgcgaagcgatcgcgattggcttggaaggcgagggctataataataaacctgcgggtttggtgcagacatgattgaagttcctcgcagcacacttcctgtgtgattgagctaggtaatccgtcaatcacgcaatacagcccacgaatatgctcggacgcagggacaaggcgtcgttcacttcggaattgactgaccaagggtttgatgctctctcctccttcatccaggaaagtatcggtgttgagaagccgctccccttgtggatgtatgaagagaacaagccaagccaccacaccgagcctaagatcaccgagctttctggatatgtcgatgatttgaacctgactgaatccctcacacaccaacccagccacggcggtctctcaactggtgggcaggcaggcaccgatgcatcctgggttataaccgataaaagctcagtcgctctcacaactactagtacactaggcactgctatgacagggggaaaatttctcgctcgataatgacgtcgactctcaacgacggaagagaaccaaactgcaagagcttgccacaagactcagactcaatccaaacctgacgcaatcgctaatatgcgccattcagaacgaatgcttgggttgggacggatttcattgcatggattcagaagtcatggagctcttccaggaagcttcccggattcaactcgcacattcgcttctggagcaatatcgcaactgtcatagcagtagagacagacagatagaaacagcaactctggccattcttctaccattcatatcggatttcaagcgggaacaaacagatccagcaggctttgcgatgaactacagtcgaatcaaagggcggatgatcaaattgggtcgtgcgctaggaagccctctctctgtgcggaaccgtgaactgagtttcgaacaagcggacctggacatgattgatcatttcgctaggagagctgctgctgctgggtgcaacagcaaggatctcaaagacgaagttctcgaaaagatagctgaggtcattcttcaagcaaaaataaacagaggaattgatgaccaaaggaacgagatacaaacctctcaatactcgcaccaaactggaggaacgatagttacggagggaagtagctcgcagactgcgaatcgagattcctctttggcacccaccgacagatcggcagacatacgatccgggacgagcagtcgagcctgcagaagctctacatctcataatagagaatgtctctggccagcgacagtttcctctcatcgaaacggtggccgaatacccactggccaaattcttcctctcctacaccctctcgcaaaatctttaccttcaccccgatcaggttgacagtttggccggggtctactctcatctagaccagaatgatgacagcttcctctcaactctaaagaactcgctgccatctgagatctttcgcgatctcatcgcccgctataaaaactgggacgatatcgtcagaatcataccgatattcattgaagacctacttgcacaagagtccaaacctgggagccgaacccagctggcaacagatcttttcgatttctacgacaaagtgagcggcagattggcgcctttgtgccctttagttctccgtgtcagggatcccgatccctttgtggtaaaaagggtgcaatgtctacaagcaatcgcaagggcgttggtcgctcggaattgcgatcctagtacactgagcgacagcgctatcgatcagctcgcgatttatctgaacgaaattttcgaaagggaggcgcgttatgcagccgatctgaatcccacatcttccaagacaaaggcagcatcggaggcttacagggtggtatataggtagtgtctgctatagagcccttgcgcgagtctccgccttgtttttgttaccgccgtcgaaacatgtaattatgattctcagaatgacgattgcctcgggacgactcggaacggaatcaagaacccagaagatgtacattcggattgacaggttaagtgaaagaacaagaacaagcggcatttcgccgatggacctggcgtcagtttgacgccatttgcgtgcggatcaggctttgacgcgatcggagaagattctcgctcgtctcgtcagactttcctaatcttcgtccatcgccgcttgagtatggttcgtatggtcgcatccttcattgctgcagacagtaagtctcggtcgggagcataatcacaagaggccctcacatcgttcctgagcatcatcgtggcgccactatggtcactcgaggctgcctcctttccgatcccagggttgcgaaacgaatggcgagatttgtgactcaaggaaggaggcatgcccccacgcatcgtgcacaaagttctcccagaacttgcaacgtaatcgcaagcgtccaagagttgggatgtatagatcaaactgccgttttcctgtttccccgtcgagcaaatcgtgagcatctgtagtccgcgacgaggtttgtgaagatgaacgccggcaaatcgattccaacccggtcgagctgacccgcctgtataccgctagggccgaccgaatctgcgcgacaagattgctgacaacccattcctgttcctgttgccagaacgtctacacgcaatttggtctgggcgacctgtcgtcgattgcattgagaccagtcactttctcgaacatttcccacgagaataatttcagttccttcctttcacagccttcaacagctttgataataggggtcattaggtccgcctggtcgcagatccacgaagcttggagggcggtggctcgggaagacgaggtaggattggcgtggatgcttgatcgagaatctgacacgtcgaacaacctgcgctgtttcgagtcgtcgaggcttgaccccgcagcatcggaagtagatgatcacagtcgaataactatagcgattgacgcaggcctcgagggagagtgggcaaattggagcaatgacgcggttctcggagtgacaaaatgattgacgggagccgctgacataacatgcgagtcggtattccggtgaaagggaggagatctgaccctggtcgaggggcctctgattcagcgctcgctatcgatgtgtatacctcacacgtaatactggaacaactcccttgtcctttgatgtcgcgtaattcaggcggaattttaacatgattgccaatgtgagctcagagtgagagctacttggaaggtgaaacctgctttcctttgttgccagcacgtgatatgatcaggagggatgttgtcctaatcatcgcgtccttgactcgcgctcaacgttatgaagattatgatgcatcgaattctctctcctttgaacgccaatcaccacatggatcccacattgcaagtagcacagcatccgatgaggattgagagacatataaaaagagcatctcaacacgcttctcccgaagatcagaccttcactgtctgatactatctgttcactcgtaattgggtagaggcaagcaatccaagcaacctatcttgattattccgccacgtgctacaagacaaacaccaacaaaatggcgacctcacgaaatgaagctcaactgaccgcgagtatgagagctttgggtttcgacgatctgtcggacatgcttgaggagagtatcaaaatggggcagccacccccatcctggattacacaaaatgtcaatgcgagccacaaagcgcctgacttttccaaatcccttttgagtcttgagagcatgatttccgatgggacctcctgtagcgtcgacaccaaccatccttttgatctgcggaaacggaatcccacaacgacacatgatagccacaaggatgaagatacttattcgactcagggacccgcaatcacggtgacgagcgacggcgattcatggaatcccgctacggaaccatcgacgtcatgtgccggaatcgaatttctggaaaagagagacaagatctacgaactggccgtggcgctgaggttcaacgaggacctcaatcaatcgatccgctgggctatcagtaacgaatgcgtatgctggaatgatccacaaaagatgaatcgcaaactcatggagccattcaggaatctctcgcggctaccgctggcaaaacatcttctgaagctgtatagcgtctgtcatggcggaaaggatagacggagtgaggtagccacacttgctaccttgctttgcgtcgcatccgacttcaaccggcctctgagacaccctgaagactttgagtgggctcgccaccggattcaagaaagcctcatgaagttctcttacgtttacgcgaaagaagaaagtcagcggaaacgcctaggaaacgaccccagatatgaacagtcggatatcggaagggtccgaaacgttgcagaaaaggctgcggctgcgggttgcgacagaaagaatattgacgtgtcggtcctcaagatattggcagctgttatagtggaggcgaaattggacggatgggtcccccaataccatcaaggagtactcaatgacacaggagaaatgcgtcaaaagtgtttcgagccaagtgacttttgacaaacagttttcgacaatggaaacgttagccgaacttgaatctgatgattgataagccttgtatagcgtttcggtcacgaatgcattgttatggatcagaacgatgtgtcgatatctttttgggccgtagagcatagcgagtcttatgttgatacaaatggtagatctaggttaagccctcttaacgattcagatcatgcaacagtatggtgacctgcctcaatccaccttgccttagaaccgaggtagcgagatcccgccgatatcagatatgcctgaactgactcattctcgctccgcgtcttcacgaagcggcagtgatcagggatcgcatcgatccgacacagtagggttagagatctggcagcgggacctcatcacaaaccacctgtctacctgtcttgaaaccaagaccgattttggcaaatcatggagaggacatttcgcgatgaataggcacagacggtgcttctcgagttccgggtaagaggcgaacctaggcaacagtatctggcgttggtctgcgccgagatgttgcgaatgggagctggaccgtctccatttgcgagcgctataggcacgggccctccttccgctgatcagaacagtttggccgcaaaatcacagagcgctttggctcaggagctgatggtgactgaagatggcagcgcggaagttgaaatgtcactgcaacaagtccaaatggataagatcaccgacatcatgacgacggcgagtatcactcctgtattgtgttggacgaagaattctatgcgagtcttgctcaagcaatcgtgtggagcctgatggtggaacggggacactccttggagggtatccaagggtgggaacatgcaggcagtgataccgaagacagcgaaactggatgagccgtgtcttctgccaatgctcggtcgagatcccgtcatgatgtagataggattcattataaaaaaaacatgtgtgtcatcatctcgatcccaagcccctggcattcaatgcccccatgcgacgtgctggcaatgtcccgttcgcgctggccatgccaactccggtggcggatccgctagcgctcccgttcacgctctgagaaatgtctccctgtacgactccccgatatcgcatacccccctcgactgtagcctgattgccgtgtctcataggatccagaccaactctgcttcccatactggtcgtagcgtaatgtcccgatcgacctgacggcctgatggtttcctgtggtcgtgcgtcgctgaccccctgtcgccatcgagatcgctccaaatcccgctcatccattgcagtcaaagcaggtccgttccgatacctcatatcctcgtccatcccatcgtccgtgtcgtccgtgtcgtccgtctcgtttgctccgagaatggcgctctctgcgcgacgtttcggcttgaccgttggaggctgcaacgaggactggggtggctgcatggtaccctgcctcgagctcccacctgatggaggcgagacgatccgctccggcacggtaaaggcgctcgaaccgcccggtatcgtctccatcaaggccggggtagataggggcatctctccggctcgctccgattgcgtcccggccgtcgacgatgccgccatgacggacccgtcgggtgcagcgaccacgggttccacgcctttggatacgagtcgcggtagaccgatgcccaggaaccgaggccacacgtaacggtcatgaaccgcttgtcgcagcctagagacgatgatctgttcgagcttcggaatatctgctcaaatacgactccagtcagcatcgtcaggagatccgagcaagcgataaacgtaccttgcagcttggccctgcttcctaatagactggtagcctttacgttcaggtgaaagtcgggcaagagagacatgtgcaggtgttgccgactttcctcttgcggctgcatcaacgaggcaggttgtaactgcatggtcaactgaaggaggggtgacaatcactgacttcagttacggcctctatttttcggagtctggcgatctgtgctcactgtgccgccgaatcccagtacctcgactcccaagttgacgggcaaaaccgcaaatcgagggtgaggaaagttgacgacaatgttcgtagcgatggacaagtgtatcgaatcgttgtaatccagatccacttccgctctctgtcatatcaagccctgttcagctggatatcgatgcgggacgctatagtgggaatgactcaccagaccgccaaacccatccgcgggccgtatccgagcgtttgatagcagcgggaagctcgatcctagtgataatgaggtgactaagatcgggtcctgcatcgtctggccgggttagccgatatcctctagtaacgtagcaaggcgtgcctttcgggactgaccagccaagaggcagacttggtgccaccgggattcaaccatttctccacctgcatcctcgccccttcctcccccgccgtacctaagagatcatttctatacccttgcaagatctggacatcccgcgtacacaatcaacgacctcgtacggtccgaggcgagccacgcgagactcacttgtgagaacaggacgttcagccaatctgccgattcggcggggtgggcagacatgtcgtatccgaccttgtccagtaaagcggcactcgaaggtggtggtacagggtgtgaagacaagtgggccttcttctcgttaccaatgttcgctgacatcagtccccgtaggcaaccttgcaagacttgtgtgacatcgagctgctcacctcgcctctcgacccggctttcctatgccccatattctgcttgtctccttcttcaaagactacgtatctcaagaacactccgcataggatgacgatgacgatttgtcccagcaagaacccttgcgtaaatgtccatgttgagcgtgaaatgtattggtaaggcggatgagctggtggtgcgacgatcgtcgaggctgtagctggcgtcagaatggtcgctgccgtcgtcgtgaggatggacttggccattttgatcttatgtcgagtccggctggagctctatggcgttgcgtctacaaagagttcctggccagagtcacaccgacaagatacgcaatctgccggttgaaatatgtcggctgttcctgatttgtggtggtccaagaatacagacgacctgcttagctcctgattataatcaagctgtgtatcacgcaggagagatccagatcaagctcgtgcagtgccttcgacgttgtcgttgtgtaatgacgaggctatcacgaccacggttgctcaaggttgaattctttcagttcggatgatgacgctttcccgcccttacgcggcatttcggccggcgacaaaccccccgaccgatatggtcaatcgatcgaaaagtcgccatgccaatcttcaacagaaccagtaatcaccacaccgctttggtaggaaatgccggtatcgcgctataatcgtattacatgcatgctaggtaacaaaaagaagaccgattcgaggagggcggaaacagaagcgtacgagacgcaaccagaggggtcgatcgatgcgtctcaactcccatctccagcgacaagtggtgtattgaagggcgaatcagaagagcgagagaaggggaacgggttgatgagtgaaaagaagaaatgaccgattcggaaaacggattgaaaaggaggtcgtcaaagatcgtcgtctatcgcataggtggacctgggtcgaatgccacaaaggcgtttactgcgaagtagcttgtccttccgtcaggtcggatccgtccaggctcttgtggttctgcaggtctctcatgacagccgggtcgactggagagtgcgcgatgaagggaaacgagtcggatcagctgggctgctcagagagagcacgcttgctgcattctgagcttacgagggaggacgcttttccgtcgtacatgcgggcttgccgaggatgaaggcgaagcgggagccaacgggttgagcggtgtgtgtagctgttgatcacaagtcagcgccgtcatcgccgtcagaacaacgtgtcctcggaccacgactcaccattggtgtcctggcaccttccacctcgggatcggccaaaggcacctgatcgtccgccagcgacctctccaagttgaagctctctgaagcctcggccgtctcgtgttggatcatctcggccgatacctcgccgacgtcctcgtcgtggaagggctcgggaggaggaggtggcgggtccttcaaccaggtcgggagaggtagactcttttcctcgcactttctgatcccaatctcccgaagctgcatccattcttcgtatcgctgcatcgctcgttcggcctccctgcgaaaagtcaagtttgatggacgaccgtcagcttcggggcagggccagaatttacgcgcgtacgactcacattcgcttatgctccttgtatccatgttgacattcttcgaacagctgcgggttgatctcgacaaacaccttgagggcgttgtacaccatgccgtggatggtcctgcggtatcaagccaagcggcacgaatcagtcgatgacgcgctaaaaaccctagccacgtcgacccacctattccagtgcgttctcgaattggtaaacaaggccgggaagacgagcgggaggatgatctggatgttttcgcccatcaaggtgacgatatacggattgttccagtagtacagcgctcgttcggcgacctgtagatgcgtgacgcgatcgtctggtttagctgacttcgaccttgtgcggcgcttcccagaggagacctcgtaatctcacctggaaatgctggctgttgatacacctcgccaactgttggaacaagggttccatgaccttttggaactcttgcgcttccatgacgtccaagatctcttcgacctcgttgaggaacatgacttccttgggcgagttgacctttggccaataccgcaacagacccatcatgacttcttccgtcaacgcggcgtccttttccaagaactgaaccacgcaataggctagctgagggtggtagagcgccaacgacttggccttgtgcaaggggatgaggaccctcgtcaaaaaggtcttgtgttcctccttgagcgggagtgcaaacccgttaatgatggatccgagtatctcgaggagttcggcgatcccgttgtgtcgttcagtctcgtagatgaattggaaaaacacattgttgatcgatcgacggatgaaggctcggaggttgaggaatttgccatagattcgatgcaaggtcgtcttgaggaaatcccgttccctcggatcctcgctgtcgaaaagttcgagtagctaccagagtgacgagtgagcccaggtccgccgtcgcgaccctccccgaccacgactcacgtgcaagacaaacgtctgatcgatgtattttttaccgatattggtactgaaatccgggttttcgacgaacctgaggaaaaactcgtacacgatctgcaagtgaggccacgcgagctcgagtacgggttcgtcctcttccgggtcaaaggcgtccccggtcgggttgacctgaggcgggatcgagcggaacaagttggacgagaactgcgggtgcgaggagcgtcggatcagcgtttgacaggccgcgatcgccgtgactcattactcgccatggcgacaacctcggggtagatggcctcggtgatgacccctcttccgacagtgatgtaatccagcatctcgtgcagagtctgcccctttgtatgtttttcggtcaggtcggccgaggtatcgttgaaatcaaagatgtagctgcattgttgcaatttccggataaacaagtcggtccgttcttcctgcctgacctctgcgagttagcaaagtgcatgatcaaaacctcgatcgtcagcctcgctcccatcatcaacgccctgaccacctcgccttgcgtcgggactcaccgttgaacgcgggcaacttttccaagtggaccttttcagtcacgtggaacctgctactcctctgctttctcgggctcttgcctacgatgggtatcgtatccctcggtccttgtctcaacttggtcaactgtcctgccttgggaggttgacccggttgacggccttccatccccatgcctgccatcccgacggtcaatccgccgaccccaccgacacctatcgatcgtccactcgagggacttcccaacgggttccctaggaggggattcggggtgacccctgcggccgtgttattgctgttgttcatggtcggggaacccggttgatacccctcactggccggtccattggcatgcgggactccatcgccctgtccatccgagttgggtgcaccggagacgacgaccaagggcggggccggtgaagtcttatccccctgcccatgccccggtcttcgatccggcgttcctacctgacccgcagtccctcttgccggtaacaacgacgccggattcccccctcccgtggatgctagggaagaggtactagacgccgcggaagccgaggtggagatcgagctcgtggtccccgtggtggatgatcgtagagggtggcctggcgaggtgtttgagggggaaggagaggcgttacggtccttttcctttttactggaatctgatccggatttcgctcgagagagctgctgcatgcaggtcgatcacgagcgagtcgacgtgggtcggtcggggtgggggaggttgttgttggacgtgggtagtagggtcggagtgagtggtattgcggcatgttgatggagataggtaaaaaggacaaagaacagagatcaacaccgctgctcaaaccccccaatcgatcctatcgtcgtccatcccgtctggtctcgcgatgatatacgcagcaaccctttcgacacaaacacccggatgacgacgggacgctccatctcgacccgaaagtgaacgtaccatggcctttttgagccccttcatcttgccagacttgggtgttcagagacgtattcgacttgtaccgatatgggttgcgaaggaggaagaggaggaggaggtgatgtcaggtgtatggttgtgttgatgttcgttcacggtcgtccttggctcgatccggggatcacggtcgtggtcgtttcgctcgacgttgcgatctctcgacgatggatgttgttcgataagactgtattctcgatctatctgtagatgtgttcccgtgttcaactgtaagtctagttgaagaatgggggcagagatggtgttgatagagtagtagttgatgttacatggtcccttttgctcgtcgttcgttggagtgatgacgccgttcgacctctcgcgccaaaggcaaagctgggccacacaacacacgcagagtacaatcacacacgatcaccagccatattcacaggctacagcaggcagctacaacatttggaaccgggcattgaagacaaagacgacctgaggcaagtacgtcctgtgatcgtgattattatgaccctcaccatcgtcatctcaacggaatgtgcttgggggcgggaacgacgacgacgtcgtcgacgatttgatgagcaaaggcgcgcgcggaggatcagatacacgatagacacataaacaagccccgggcaaagtagtcgaacccccgctttgcaatactccattcgagtggttgcgacctgtcagtctgaatctccaccctagcgctggcctatacgacccgtcaagtcgacagtgctcgactctgccgagtgctatggctgccctgtcgatgactgtcgttggaccctgtttgatcaaaagatgaaccaaccagcgcgcggaatcgtccaaccaacaaggggcagaggggggccaaggtagcgtaacgtcagggtcacgttacttttacgtcactagtgccacctgcccactcgatccgcggataccctatgatcacgcaccacgggccaccgagatgtatgaaactcccaccatcaatggaaacacgttctcggacgagacagaaagagacgccagcccgcccggttcgaccagactctacctggaactcgaccaacactccctcttcgtttcgactgtcttatcctatttcctcttgcacattcgatacaacacctcccttcatcagcgcaactcgaaccccaactacaacttggcgcccggttcctcctttctgaccctaaccacggctttcccccaagtcttcctcttttccaggtcgtccagtccattgctgacgtgttcgagcccgtcgtataccttgtcaaagacggcggggacgagtttacgttcgctgaacaatctcatgagttcaccccagacgtggatttgctggctaggttcgttctctattggtccccgcagcggaggagtacggatcagtattccacaccgtccaaaagaagggaggatgatccgagtctgcctgacgctccggggtcactcactagtataagctccccaatggacaccgacgatcgagatgtttttcaacaagatcaagttggccgggatcttttcgatcgtccctgccgcgaaaccgacgacgacgaccctggctttccatttcacacatttcaaactcgggacgatcaggccctgcggggggtcggagagcgaggtctttcatcagcccgtctgcgctcccggggtttttcaaggtaggcccggtcgaccgagggaaggtgcagcgcaagaggactcaccaccggatcgtagacgacgtcgacccccttgcctcccgtgatctgcatgacctgtttctgccaatccttggccgaataatcgatcgcgtggtccgctccaccgcgttcgatacagacctgtcgtttagcttctttcgaggccgtggcaatgacgttgcaaccgagggctgtgcgcggacatccagtttagtcgcgttggatcgaagtcagtctcttttcgccggatgatatcgcaatgccttggaggacgggcacgaacatcgaccccctgcttggactgacctttagcgatctgaacagcggccaaccctaccccgcccgctccggcgtgtaccagcacccaatcacccttcttggcctctcctctacctaccaacccctcgtagctcgtcgggtaggtgatgaacagtcccgcagcttgttcatacgtcatcccctcggggacggggaggcagagtttataatccgctgtgacttgctcggcgtacgcgccttgacccgctccaaagaccttgtctacgagcagacatcgtgagaggggtggatcagatggtattgctacgcatggttcgagggtcgaggaggggttgaagactcaccaccgggcttgaaggggcatcctttggggatgggagagtctttagcgatccgaccggcgaattcggttcctagcacgaatggtaacgggggttgatctgtgagcaaggtgtggacggggtcagcattccgtgcttctatccgacacgaacgctgtccacgtcgcctactttggtatttgccttgagactgcaggatactacgcaagaccccctcagtagcaagatcagctccacggaagaggtcgcttctagagacagtcctacgggtgctcactcgaaaaagttcaatccagccgtataaacatctaccaaaacttctctgccggtcgggacgggtgctttcacattctccgagctatccacaccatcgacgtacggctcgatcagcatcatgatggaggagcgagtttcgctcgacttacaccttgatcttggtaggatgagcgtgctctgagatttgaaaagccttcattgtcgtcgtttctttgtgtatagcacttcgttcagttaatacccactgatgtgagctcattcgatgctgtcgaggtcatgtttgatcgtcttgaagctggtgataccttgtccacggggatctcggggttgtgacctccaccctgcgatttcccggttactcgctcgccgaaggatcagataaccggaacgtcacgacgcggacatgcaactacgatatctaaagtagtaaaagacaaacatccacatgtccgtcgatggcgactttggtttcaggttttgagtggtagtaaccctgcgtcacctgcgtcaacacgtctctccggcaggagcatcgcacagaggcgatgcgatgctcattggcgatgacaggagtatggtgggagcaacggccttctggcggaacgccctgcacctcaaatccccgtgatgtgttaccgacctggatacagagccggccccttcaaagtgatttaacaggaatccaaagtcaaacgtccgcggggagcccaattgcacaacctgatcaaccaccttcgagaagcccctcgttaaaattcggcacgtccgatccgtcctcggctcaacagatgaaagtggtcacgttcgccaaactcatgcacagggtctcgtttgaagaacgacgattttacaaaccggagacacaatatccgagccttcaggatcatagcgagagacgatcgaattcgatacttggcgatgttcgatattgtatacaattagaaagatggcctgggagcaagaagcaatactgctttccaaatcgagaaaacaggaaagtcgacctagagacggacattgtccggcatctttcggacgctgagatgtccgtagaggaaatattattgtcagcggattgtacaccgagcggtattaaactctggtcgccactcacgcttgccgcacacccaagtctcccaagatgtcttccgttcctccgagaatcgcatcgaatttctgttgcgcccggtcaccaacacgaatcagcacgccgtcgctgtcgaccgatagacctgctcaatgcgccctgctgtggaactcacctgagtctggtggaagtgctggatgtgccttcccatccccgtcttggtcaacgcccgtcctccaaagatcatcatcgcatcgctcgcgatctctcctgctgcgatcgtacactgcatcttgaggaaactgatctgactgtggaggcgccgggtctgcaacggtcagcgtgtgtatcatgaggtcaaccggggcatagacgagacgtacccagcgagatgttccgacatttcgttgtaggtcatgttacacatctggaacgtgactgcctcgagccaagcctgcaaagcctcgcacttggcgatcatgtgcgccagcctgcggaatgacgctgcgtcagatcctgacatctcatttgtttttcccgacgctcgtgctcacttgttacggatgaccggctgcgagatcaatggtgcgctgaagactcgtcgctgacaagcccatctgcgagacaagtcggtcgtcagcaatcgcctcttgtcagacaacggaatctgaatcggtgcagcaacctacttgagacactcttcaacagccattcgggaagaacgagccgatccacaacacatggtccatcgttcatgctatcgaagtaaacaaagatcgcaaggtgagccaccctaaacttgttgcgatcggccgaccagcctcgagactcacgttaaagttggccactatcatgcgtcgaacacaaacccggcgtttagccatgacacggacgaattgccgccgaactcgcactcacgaatgaccttcaacccctcgttctctttacccagcatgttctcggcaggtaccttgacgttcttgaacgtcacgtacgccgtaccggcggacccactgtaagcgaccttgatcggcctggtctcgacgccctcttgtcgggggacgaggaagactgtcaatccgttggctgtccgggtggctacagaccagtacgaggcgtgcattcctccagtaatccatttcttggctccgttgatgatgctacgaggtgtgggtgctcaaagtcagtagggcagtccgatcggatgacaggacagggcgattgaggactgactagtgtttgccatcctcggttttgacggcggtcgtcttgatccccgctacgtcactccccgcataaggctcagtgaccgccagactgacgctctgttccccatgatcgattgatgggcatcagttacccaccatcgtgatgttcagacgagctggactcacgaccttgccggcaaaggcgtcctcgatgatcttcttcttcaagtgtggtcgggcaaagttgatgatgggtggcaacccgatgaccgtacccgcttggaaacctaagtgcatgcgtatcccccgatcgtcagcctaccgccgggtccatcccaatcggtcgcagagtttactcaccatcggcgtaccccctcgcctgcaacctgctcaattcttggttgatgatcatctcgtggaaataatcaaactcttccggctcgacggcgccatcgaacaatttccttcccttcaaatgttcccccggtccttgtcgcatggcgtgtaacccgttctcgcccatcatgtcgaggatcttttgagacatcctcttcccgctttcttcacaggcttgggcatcggggtagacgtgctcatcgatgaactttcgcatggccttttggacgcggaagtgagagtccttgaagtaaggtgattgtttgtatccggtggacaaccacatgggttcggcatagggtacctatagtcgtatcaccctcacacagtcttatcagccatcgacaggtctaggtggtgaagaagcgagcgtcacggcgccgggcgaggcgagactcaccgtggacaagctgccactctcgttcctcatgaccttttgctccatcccttcgacctgaccgatcttgtacttggcgtacctaggcgtatagagtacttcctgcctatgaagcccgaagaacgctgccgtcgcatctttgcccgctatcaagtcgaccgacccgagtacagaaccagtgttagccagatgatcgtaccgggtgtcacagaggagacatatgactcgcctacttcagggtcgagcagcgcagcaagacctccagggtggatctcgctgaactgggacatgtcgtagacgatcgagtcgacgatgacccactgcgaacaaaggcgatacgaaatcgaaggtcagaaagggaggcggacaagtccgatgaccaggtcgtccaaactcacgaggtcgccttccttgttgtgctacaggatgacgacaacatcgacgacatcagcctcgatgctttgatctgctcgatttggatcgctaaactgaccttggccacttcctcctttgtgtacctcttcaagacttcctgagtactgacgatcgcctttgtgagatctttcggtgcgtccaccttggccttggagccggcggttgcggaagagttgaccatgtcgatgatgtgtatgtacagatgattgagcagacgggtgttgatgcttgtggcactcaatcgatgtcgatgtacaatagtgatggacgatatgattgttatatctattcgatcgtcttcgattggcctcttcttgctcttgctctttaaccggatcacccgaataaccggaggcaagatcgaccgcaccgctacccatttcaagtacgcgtcgccctaaaggtcctggctcggaagcaaatgacacctccagtttcaccacgtgatcgagggttaggtaaccccctccatcccgcgccattcactctggtggctgtgaaactactcgtacgtacgaacgaccttgaaacaccagaccaggtcacttgacagtaccgaccgcgatcactttactctgtccacggcagcgaatcattttggtgaaacctgctgtgtgtgatgaacaagaaccctctactgtaccgcctcggttcttttgcgtaatgtatctttctgcccgaaaggaaccaaccagtatatgaccggctctcgacgcgtgagtatattaatctggaacaagtggattcaccgagacatccatcatcagatctcgtctcgaccagcccgtcggaagctcagaagaagtacatgctgtcttttgcccactgatctcggacgtctctgagctcctaatcacaccatatcgcaacggggctcaagaacactgcctgaccgagactacggtaccgctcgttccgagtttcatcaacccttacagagatggcggaagagaaggaacctcatcaatgggcttcaccgctccacgaacgggctgaaattctgcgagacttgtttcatgccgtatttcagcttatagacaagctgagaaagctccgatacgaacccgttccagagatccggtgcgaaatcgtccccgcaagggctgtttcgtcaggtaccgcaggctgacgccggattctgctgtttaccttgtcagagaactattcggatttctcctgcactacgagaccatctttgaatcgacagtgaacaatgctaccgccgttcctccatctgaatttacatcggcaggttaaaaggcattcttggaccatctcatgactcgacacgacgcgttgaaaatagctacaaacaaacttaggacgttgctacacggcgaaaccccccttgaagagcttttggctgaaaggcatcaacagtaccccacggatctcttcgaaaacgttgctataatcctcttcgctggggcgatactgttcgctcccgttgtggccttggtagctggcacagtctctctattggggcgaatatggtggcccaggtctcatatcatgaaacgtcggaatactgtggatgatcgtgagtcgcaatggggttacagagagattgcttgggctatggtctgatcagtagcttttctcgcttcgactgctctgcagttctccgggatatccagactctgctagaaaaaatccataccgtcgcggagaagatcaggtgaagctgctttccaaggtctatcgaagcatcgagcaagtggcgttatcgagggctgaagccgagactacgaaactcgacgaacagacagacgaaatactgttccaagtgactgttaacggcaggacgtataggcccaagtcgacagaactttgtcacttcaccgaagccgagcgaatacgatcccgcaaagctcagcaggataggtttctaccaaccgggtttctcgacaatccatattcggaaatccatcctttcgtcgaggaagcacgcgggaagctgatcgaggaaattttttactcttttgcgaccgacaaggaagccctagagcgcatattctcacgcaagatctggttcagacttgttcagatttccatggacccggtgcttcgtgaactctcagactccatcaatgaattccgcaagcatctcgaaaatccaactgagatcgaataccgggtttatgtggatcttcgcgctaacatccaagatcgactccaggccgtcgaaatcgaacaccggcggtgggactttgcattgcgccactggcaaacctcccacatggtcattgctctgccgatcgacgggaacctgggatcattccgagcgcaattggctgaatacagcatcgctccgatggagaagatcggtgcatacacgtatctatgtcgctgtccgcctgaattcggactgttggaccgagtcaggcaactcccctccatcctgtgggcatggtactacatgaagggtttcgtcctggcggcggggttagacctgtctgacttgaagtcggtatgggaactttttttcgaatcaagaccggccaggtcctatcgcctcgccgatccaacgtcaaggatcttccccactggtcctaattgaccttgtcccgcatgacgacgttgaactagccgatttgacgctccaagtctcacgtgttctgacaggcgatcaccctggcttgagactaccgcccgggattaccagtttgagactcgaatttagcatcgaagagctgtccaaggtggctagaattgatgggattcgaggcatttatcctgtggacacgtgtgacctccacaacggttaggctggagcgatcatcaaagcgagcggaagctcaggaggtatcagataccaaggaagcaacgaaatcgtttgcatagccgattcaggattcgatagaggtgacctaacggacattcccagcgcctttaagggtttttttcagcgacgggtcgtttcgataacatcttggatgactttccctaccgaacttacaccggatgaacaacgtcagatgatcgccatgcgtggcatcatgcttgggcatgatgccacaggccatggcacgcatatcgctggatccattgccggcgatggtcgttgcggcgacagattgatgatgtctccatgatgtggagcaaaactcgtaatacaaaaagtcgttcatggtcatatacgtacccttgctccaaatatgcccgcgcttctgcttgatgcttggaaacgacaagccaggatccataacaacagctggggcgacacaaactccggtcaggtttacgaacctcaggctaagtcggtagatgcatttgtgtacacgtaccctgaaatgacggttatcatatcagctggaaaccggggaacgatcggggatggcagagcccccttgccctactgtcctgatcagatgccgattggacaggcagggcccattctagattccgcccaaataatttttttggcgacctcgaagaacagtatcgtggcaggcgctaccaaaaagcccgactcgccatctacgacggccgtggtgtaccgggatacgcaagtcatcaacaagaaacacaagcttaaggtccgctcaattccacttagcttcccggtctccgttactgcgctgaggaaacgctcgatgtttcgagccgagggcccgcagtcagccttggcaaggaatgggccaaggcggcgctgagaataaaaccggacgtcgtagccccggggtcacatatcatgtccaccaatactcgttatgagggcgctccttcagtacgaccactgaattcaaattggaggatcattcaggtgaggacgccgcaggtaactgcgcatgtctcatcccgattcaattctgacatgttccgccactgtcataggcaccggcatggctgctgccttagtggcgggctcgtgtgcagcgctgcgcgagagcttgaggaaaaagagtcgcataaagatccgtctgcggccttggtcaaagctgctctcgttaacagatgtgatcccctaacctattcggatatgcccaactacgaatcagggtttggacgggtcaatctcgcacaatcagaaatcgattggcacgactcggaaacaagcgggatcttggagaaggacctgccattcggcgaagattgcaatcaagttttgaagattcagtactcaggcgagctcagagtgacgctcgtctggacggatcctccaggtgaactcctccagaatcaccttgatctgattgtgcagatccgtagtacgtcgggtcgaaccgagccacaccccgtcgaataccatggcaatctcggcaacgcaacggcattcgatcgcgtcaacaccgtcgaaaaggtcagttgcagggtcaaagctggacaacaagcggccattagggtccacgcacacaaatacctgaaccccaccgaacctcagcgcttcgctctggtctggcgcgttttgaagccgtagtcgcggtccatcgaggaatatcgtaaggagactagtggatcaaatccattcaatttgctgatgacatattcggtatcggtatcggaggttgcagccattcttatgttttgtttacagcctggctgacctctaccaggatagccgtacgaacgctattgttcgatgccagtaatggtagtggatgtgatgttgttttcttttacgttttacgattgagggccgaattgtggatttaccgcggacggcctgtattctcaagtatcgcgcaccagtctgcgtcgtctgtttcctttatgttatgcggatccaccgataaagtacctcttttcagtgtttcatgtcgcggcgtttgaaagacattcgaccgtgtccgctggtggcatcgcggcgtcacgcacgatcactcaggccgcagccaacagcatgcccggtcacgtttcggcagacgagcgctgagatcagctattcagaagcgatcctcgatgttgtctgtcgactgatgtcttggccgtttcttatggggctaccataatgcaaagacaggagccagacgtcctaacaatgaccacgcctggtgcggcccgggaaggttcatttcttcgaagtttcatgatttcgattacgttttcactttcataacgacactccatggagtatcctctcctctcctctccgaaaaaaaacaaacaacccttcatccgtcctgcccgcacgcgaccgcccctcccttacttggcggtagtaggcgcatccccacccttcttcttcttcttcttgtcgtccctcaactttttgcccaacaagtttttaagctcttcatccgcgatcgacttgtccgacttgaccttttcactgcgggcggggtcggaatggcatcgcattgaaaaggggaaggcgggacgtggtcagcttctggttctcacggcatatattccttgccctgtgtcaacgaaggcgagggacaagacccgtgtcgacttacggcgagtaccaaacagggacgggggacaacaacagaggtccagcgggcaaaagggccactacgacgatcaccggcatgtcagctcttgctcttgctcttgctccaatccaccgagactatcccgatcggacactcacgggtaaagaagaactcggtgaccacggttccgggggcggtgtggacaacatcgtacggcctcaagagcgctaaatgaagtggcgcgcgaacgtcatctgatcagcctcacgcacgcacccaaaagacactcttcgccgatgggaccggggcctcggactgaccatgctggacggcctcttgtactcccatcctcgccctcttctcgtcctcgagcactctcaatgtgaaagggaacgctcctgcctttttctgtacctcgctaaagacctttctcgaggtctgcatcttgagctgataattcaccttggggtcacgtttgtagatggtcgtcctgctctcctcggtctttgccttgccgtccgcgcccgtggtgatgaggacgtcgatcccccatacttctccctcttcaaacgtctcggtctcgtggtcccgacgttgctcgggggcggggttgaggatgattcgtttcttgccatcggtgacgttttgctcgtgggtgcacgagagcataccctcgacggggatacaaccgtggtccttggagatggtctggacgatgtcggtgatggaaaagttcttcaaggtgggtttgatcgatcgcatctacccgggtggtcacaaaaacatgaaacaggatgagcccgaaggtactcgacactcgatacactgacgcccatgctcgccgactcacagcgacctgactggcctcccatgcagctttcaaagcgtcagccttgacgccctcgaccggcttgctagcgtctgctccgacgacgagggtctctgcatggacgctcgcgtacccatcgatatgaacacctagcatgaccttgacgacgtctccttctttgagggtggggacgtccttgtccgagggcatgggggagaaatggctgacgacgttgttcagggagatcgaggtggggaaggcgattcccttggggaccgaggtctttttcgaggtgtacacggtcgaggcgtgttggacgatcaaagcgtctcccctgcgacgacggcggcggcaaagatgacgatgacgggcgagcgagggagggaggaagcaagggaggttcacgattcgtcagcctttcccactttctcctcttcgacatcccgggtctgaccgagctaagcgtttcccccgatactcactcgttacagaggtcgagcaccgatttcccctctacgacggtagggatgaacttcttcaagacatctcctaggatggaagaagcggtctggtactttgtcaaggcgtcgttgctgagcttctcctccttgacctcggcagcctgggcatcggcggcgggttcagcgggtttcttgaggtcgagctggggagtcgacatggtgttggtagtaatgtgagtgtgtgtatatgtgtgttttgatctgatgtgaatcgatgggctggatcgatcgatatgagcttgatgtccatatcctcatcagatgacgcccacatgacgccaacacatattcatatcacaagcgcataaagttggaaaaacaccaattagaagcgcaagaaaggctgacgcgctctgagaaatgacacgtcatgaacggtaaaacgttatcaaagcagttttgctcaaaatgacacgtcatctcagtcagcgataataacaatcgatcctatcaaatccacattccaactctcacgtgatcaaacctttctccccttccccctcacaccaaagcaatttccttcttcaactcgacgacatctattcatctcttcacctcccatccccacctcatcaatcgacactcctaccgacgactcactcggtctattcacaccgtactcccgaacaccaacttgtaagcatcgcatgtccttccttttccccgtcagtcttgctattgcatagcacgcacggacgaccaccacctcgttgtccaccacaaaacgcgacatgacactacaacccaaaaaaaaaaacgtccaaccaaagacaatgacaatgatgaggctttcaaaccataaacattaggaagtgccgaatgaccccattactccccagtcagactcatgtccggctgggggggttcacctctttgacctcttcgggggtcgacgggtgtggatacctctttccctcattaccccaactttcccgttttcctcctcctcggcgctctcccccgatggtcatttctttgatcatcagggttgagggtgtagagtgaggagtcgagactggggatcccggtggtacggggaaggaggtagggtttgattttaaaccggttctctgaaaagtcaccaccacccaacaccgaaacactacccctcgtttctcgttttcatggtcgactcgatgtacgaatctgttgtgctgacactctgcatcgatcttgttatccggtcactgtcccgggtatagatctggatcatcaagaacgaggctacgcgcaggatcctcaactccgaacatcacgaccacgagagacgacacacaatggccaaatccaagccttccaaaaaggccctctccaaagcccgtcgacacaaccctatccggatcccggactcgcaccttccttccgggtccacccatgcctctggctccaacacgacctctacgacgacatccacacaactcctccccgtcctctccaaactctcctcgacgtcggattccgaccgtgcctgggcggcatcgaccatctcgacgttgatcagtaacgacccggcgacgcggaggttgtttttggggaaaaacgtcttggagaaactcgtcaacctgttgagcgatgcttccggggctgtacgggtggaagggagtggagcgttgaggtgagtccgcagactggacgtgaggtgtgccttcgttttgtttcgtttcacatgcctcgccgaggtggttctttaactctcttcgaggaccggacttgggtgggggtgggcttgtgatggccggaaattcccgaagggcgggtgaggggatggtatcgatggacctacgctacgtccctcgtttcgcttctcttgttgttgtataccttaaacctcccccctcccaacccgcctcatgcccaccctcgatcgaatcccatatttttgcacgcctggtctcctatctttattttccaccgtccacgtgttgacccctctctctctctttctctctctcttgtcaatcgtccttgtctcccatcctgctcgatatagaaacctggccatcgacgggggccacgaggtgtgcggcgcaatgtacaacaaacaggtgttgaccccgcttcaggtgctcgtaccacaggtgagcgcggcgcaggcaggcaggcagctcggcgagcgtcttgctcgtgatggtgaggagcaagggcagagctgactttctgttcttttcggcgtcgttctcttctctccctgaccttggatcctcaaacccgaatccgacctcgaccctgtccgaacgccgacgttgcccccgtcgaatagctatccgaacgcatccagttgatcctctctgaacaaggtctcccggtcggttcggaaaaggccgacgggtacttggacggtaaccaggtctttgcgctcgcggaaaacgtcttgaccttgttctggtgtttgaggtgggtctctttgacgtcgacatcatctcgttgacgctccagcggaagagggagacgacgctgatggtccgccccacaatgtgtcacagtgagaccagcaacaagatcctcaacgccttgaaccagatgccagggctcccgtcgttcttgttggcgttcatcagtcatcgtgaaaagatccctgccggggccgtactcgccgccgcccagtgtttatacgccatcacgctcgacaacccgccattcaattcaaacttgccgagcaatgtcgttcaggacctcttggccgtcgtccaaagcgagcagattaggatgctcgaagagacgcccgttcccacggcggcttccaagggcaagaccgaaggcatggaagtggagacggaaaagacccgcgccgtcgaggtcgtctccgaggacaaaaagtcgctactccgggtcttgatcgccggggtgcttcacaatctcaacgatgacggtgcagagatcatcgaggggttggacaaccgggtcgttggacctctcttgcgaccagtgctcgatctcgatctcgcccaggtcgcgcaagaggtcatcaagaccgtgcccgagatccctaccatttcggaaaaggatgccaaggagattaagaatatgaaatcggacctgcgatccccggcagagatcaagttggatagtatcgagaagcgattgtccaccctgatggtcgctctcgaggtcatgaccagcgtgtgtgcgggtctcgtggacgccgaggatcccgccgtgggaggtgacgacgaggacgaggacgcagatgtcgacgaggagatggacatggatggcgaggctgatttggacgaggcgttgatcgccaaaggtcgagaacaagtcggagacgattcgatggcggtcgagcaacccaaacggaccggatcgacctcgctcgacgggctcatgggatccaacatgcacacccgattgttcgcgttggcccaggcgaccgaactatcttaccccccggcatccggcggactctcccttcaccccccttcgaccgccttcctctcgtcaatccacctgcgtgctcttgaagcgctcaacaaccttttgcttaccatttcgtcctacgccccgacccctgctccacctttgccaagctcggtgcaagacgtgccctcgagcgaccgcaaggccaggtccgaatggaaacaatttgtcgctcagtcgtttagcaacttgaaccagctatgggagggttctttcgagatcgccaagcagatcgtcggcgccgacgggtcaacgctttcgggcacggaattgctcgagatgaagggtcaagaggtcagaaaggacgccctcgaggtattggcaggagtctgggtcggtctcgcacggatcggatcgtatggcggtttggtgagtctagcacggtttggcccgttcacacccgttggtcgcttacacaagatggaatccggacagaacatcgcgcatgagcagatcaccggtttgacccaggtctacacccttcttccgtcgaccaacttgaagacccgtatcatctcggccctggcgaccttgtccatgaccgagggtctcgccttggaacagaacaaggtcattggggacctcttgatgtcgctcgtcggcgcctcgcaacccgtctcgacggaagagactgtcgccgcgctcaatgccatctttgacgtatactcggacgagagatgcacgtacaacgaggtctttaccaccggtggatatctcgccaagcttaccgccgtggtcagcaaatgcaagagcatggtatgtcacctcgcccgcccggctccaccaggctcagtcggctgaccttgaaacgtaaatgtttgacagacccgcagtgtggacaagcgcaagcagcccgagctacgggcccaggctgaagaggcctacgagaacctcgtggcgttcatcaaatacagacgtagtgttgcctgatcagacagatcttggccgagtccccagttgtaatcgatatcgtcgcgctcgtctctgtatctcattgctgtatcccgaaagacacgtgtccatttcgcgattcattcatgactaccctgccgtacttgttccggaaacggttgcgccatccagcataccagctctcggcccatcctaaatcccggctctgagatccgagagggtcgacgcaaaccgtttggaaaacctccgtccctaccgagttaactccctccagtggccaaggtcgacccgaccaggaacaagcgcgccgcgcgcgtgattgcggcagttgccatactcgtaagcgagaaagtgctatcagctgatagatcgacgtcacacccatacgccatccgatcccgacaaagactctttgcatcgatcaacagccgcaatgttcatcataccctgctccttttcaggctagtgaccggccaaatctgtgttcgggcatgtgcgcaacgccgttcgttcgcttgtcacgttcgagccttgcgtcaccgccagtgtcggcaagcgatgcaagtccaacagctcgccggccggcgagatgattgtgaagaagaatttgaagacgtctgctgttcaaaacggatggactcgatattatagtggactaaaagctcaagcaatcttcttgtactctccatctgttcagattagaaacgaaatacggacttcacagcgggtccaaccttgacattcgtattgcgccgacgactacaccatggacaacgtcgcgcagacagctgctcaagctcccaaggcagtcgctcatgtagccaccgcagctcccaaggtcgctggtcgacaagccgctcatgccccgaccctggccaacaaacgagctaaaagctttgcccgtgccatgcaccgtccatcctacatcaagtcgaccgaccccgaagacgtagaaaagggtatcatcggtggaggcaagggttggagggtccggagtgaaaaggatggcaagccgagcagcgacgacgaggagactcgaattggctcggaacagagttcgagggatgagaagcagagcgacccttttgatttccctgcgacatataccaagaaatcgacggacaaggaaggtaacgaggtcatccttctcaagtttgtcgagggtgaccgggaggaccctctcaactggtcgagggcatacaagtggtaaatatcggcgttaccgatcgacagctcgcgccgctgacaaatccgatgcggtttcaggtatactactggtcttttgtgctgcatgaccttgttcatcgtgagtaatctcgcccaaccacaagatccgtcgaatgagagctgaaagatcgacttcttcattagggtctggcgacgacatcgtacagcagcagtatcgggagtatgacggaccagctaggcgtttcgcaattggctggtcaagccggtctgaccacgtttaatggagtgtgagtgccctgatctgtttttcttcgtcaatccccagatccgcgccgatatttacactctcctatcacagctgcgcaatcgctccgctgatcatcggtcccttgaccgaagtgaccggacgaagatacacctacattttcagccacatgttcttcgtcctgacattcttgctgctcgctctgaaggtgagcctgtggatccagtccgattctttgcgtctcagaagctcatcgcctttggagatcagaacaacattgcccagattctcatcgggcgtggtatcttgggaatgttcggtagcgtcggcacaatcctcgttagtcggtttttcgctccgggcccaatagtatccacctgaacagcccatcctattcgcaggtcggagggacctttggcgatatttggaaacccgtcgacaggacagtgcctacggcactcttctcctatgtcgccatctttggtaccgtcgctgctcccatctacgctgggtttgtggacgaatcccttggcccttggtggcaagaatggatccagatgatccagaacggagtcctcctggttgtcgtcgctttgaccttgaaagagactcggggcgatgtcaagctcaagaagcgagccaagcagatcagaaaggtcactggagacgatcgttatatcgccgagatcgagctggaggcaagaaactttgcggaccttttggttcagagcaggtcggtgttgctaactcattctcaattggatgcacgactcctgatgttcgatatcttcatcttccagtgtcaaggccatccacttgctgatcaccgagcctgtgctgtttgcttttggtctctggtaagttcgattattcgcgcagatcaattgtcccccgactaatccgtgtgtcatgacccacaataggatcgcctttgcatggtttaccacctttgtcttcctctcggtcattcccatcacgttcgaggagaagaaaggctggtctcatgggatcggaggtcttccttacatcgcgctctgtatcggcgtttccatcgctttcggggtcaactttattagcgaacggtgagtctcggcacagagcattcagatgctacatattaagggaggctgacgggatgtcgggattgagcaggatgtaccgacgaaagcacgaggagagcggtggcaagaacgttcccgaggctcgtctctacctctccttgtggctcggatggtgtcttcccggtggtctattcatcgtaagtatcatcgctatttccgagagctctggttctgcgggagctcaaagttcttgctgtgtagtactcgttcacccagtacgagaggttgcactggatcggaccctgcttcggactagtccttatcggagccggtatcttcagtatctttaacggggtgagcctcgctgtgaatacgctcgataccacgacattactgatatagccatatgatctccaggtgtacgattacaccaacgatagttacggtcaacaagctagttctggcattgccggtcaaggtctcatgcgaaacatgttggctgccgtcgggccgttgttcgcctcgcaaatgttccacaacagtgagtgacgaggcccttaagatccaatgaaaattcgagtccctgaaacatctgaactgccacagtgggatctcaatacgctggtctcctgatggctctgatcgccaccctgttgacgcccatccctttcatcctattcaagtggggacccaccctccgaaaacgatccaaagtggcctctcaatacaccgactgattgtacgagcatcatgtcgaaagtataatatcgtgaatgcctctggaagcctgtctaccttactttcttgcaacttacacttgttcaagtgaaacccgcctctaatttcggtgaagcgcgtcgaagccggcgaaacgtctgctgatggaatacaggtaggtcgcccaattgtttagctgcataccatccggatcatcttcctactcgaagacttgtcctcgtgccttcaagccagagccaggtccatcatgacgagactgcctctatcagtatggcagcacgagtatgagatcgatgcggcccgcagcgacaacgtctcctttgacgtcgagatcccggtcatcgccgatgagcaagattgggcaggttgggcttggatcaggtcgaggttggtacaggtgtaacctgcacgctctcaagcatctcaaagaactgatttcttcgacagtcctacatggatagaggtggaacctgtcgatcttgtctatctgatacctaataagcaatgctacctcttgctccttcgatcgaaatcggactcatcacatcaaatcgccatctacccggtcagttccaccacagctcacggaacccttcgagccggaccccaggagcatcaagtcgggcttggcacgcttcagctacgaggaaatttggtgaccatttcaagcaaggtcgggaaactacttgtgatcgccgtctcgagcaaagccgggtccgagcctgaaccttggcgactcgttgagagatgcgtcgaaataggtcggcaatggcttcaccagctccaaggtcgcacatatcagccagcgaatcatgcagatacggagggtagtcctctgaatcgcttgagcttctgcacgtggaccagcttaggcgagagtgagtcgatctctctcactagatggtacttgttcgctgattccagatatcagcgactcgcccaacgttacagaacctcacttcgctctgccaatcgattcgatcgtcttgcatgcctattcaatcgtttcttatcgatgctggatggcagtccatcaattctgagccgaataccggcaacatcggaggggatactatacgacgcaagttgatggcttttgagccatatgacgggctgggcgcctcgttgcaggaggtcgttggcatgatcaagcgagagttgcctacagtccgagacgtcggagtttggatgacgtgagtccctatctccaggctgtaggatctaatcccccaaggctgagcctttgctctcgtcagtctacaagggttttggtgtgctatagatgcctcttccccgctcgtgtccaaatacgcttgcaaggcatacccgatctcccgtacagggctccccgggatttccaatgaaccgggaaccatctcctacatcgacccttcggactttcaccccgtttggcacctgcccccgccggaccgagctcacgatttctggtccgactggttcgtctacctgaaatctcagggcgtttcctggatcaaggtggataatcaagcgagcatgtccgtccttgccggggtggagggagctgaatgtgcgacagcgatgtggaaggggatgtgcgaggcggctgatgagactttcgggccgggtcgggttttgcactgcatgaggtcagcgtctgattcgctagctcgtcccagatcgacgttgagctgatacgttcttgttatacatagtcattcggagagagtgttcaacggagatatcggtctgggtctcgcaacgctcggacgacggatcgtcgtgcggtaagatccgaccgatcacaggttgacgaaatcctactaagatatcgcgttgtgcgttttgctctgtaggaacactgacgactacggtcgactctggctcgctcagcctcaccaagaccacgtattccaaaacctctacacgtcgatcttgacgtcaaatctctgtgtcgtcccggatggagacatgttcatgtcccagaccgaagccccggtctttcacgccgtcttgcgggctttgatgcccggtccgatcttgttgaccgacaagcaaggacaacacgatcatcagctcgtgcatcgattcgtcggcgagaccaaagcaggcaggcaaatgattctgaagacggatcggccggcgaagccagtacagaaccgcttgttcgatggagactgtcgtgcggggggtcacggtcgagcgctgctcgggtcggtccgcctacccgagctggacagcgtgatcgttggttgttggaatgtccgcgaagaccacgtcgacaacaaggtggacgattggatcactgcggacgatctaatagacaccttgtcgccctcgaacctggtcgggaagtacttggtgtacaaaccgggttactgttcagagtcgacttgggcgcagtggacgcctacacagggcgatcccaagggtcgaatcatgcatctcaccttgaaccacctcgctgccgagacaatcctggtcgttcctattcgcgaactacaaatcgatggtcatgacgtcagagtcgcattgtgcggcttggtagacaagtttgccgggctggttggaatctcggacgtgcgcgtcggatccagaggcaagtcgctcgtcgtcgtcataataacaattgctttgcgctgtgcatttgcttatgtccccacgctctcgcacacttcacagactctcggactactggcctgtcctgtcgagtcgaatgtacggggacattcggcctagccatccagcagaaccgggatttgccgcccatcaaggtgttcatcgacgatcgccctgccaatacgaccgagcataatataacaatgtccggtggtgcagaaacttggacttggatcactttccccattgttcgggacgagcactccttcggaacccctgcgaactcatccgaagacggatccgacgcgggttggctagtgactctagaatggtgattgccaggctggaatcgcctagactccggcattatttgtcccggagactttctcggcctgccagcgaacgcaacggagatcaccagaccccagcgacctgttcagcggtcggaacgaccattctaagagatcattgttgttttcgaaccgaaggcatcaacctctccggaagtatatttgtcaccgggggctgtagagcgaccgacccgtaactgcccatcacctcgacttgaaccttcctcgcgctgtctataacctacccttttgctgcttcctctcatcgcctgtatcctccactatagctactataccgccccttgtcgatcgatatcatcacacaccctgagctcattgaaatccaagatggtagccaccgagaaagagatccccatcctgatcgtaaatcccgtttctctacgcaacccgtcttcccgacccgcttgaccgggcccgaggttgacatgcacgtaccttttctttccccgcctttcttccctattccatcacctggtcatcccgatgtgatcgatacctgaaacgcctctggctcggggtcgtaggaagagatcagacgattagcagatcctgctacaccggaccaggtcaaatacgggaaactggtccgtgacgaccgggtcgcgaacaagtgtgagtcgtcgtcctttctcccgccttgtggcgatatcccagcacggttccaaccccaccattgaattcaacattgaaccccgacctcgacacttactgaccgtgaaacctgtgcgtcgggacatctttcacagtggaagccctcgtcggaaccctgcgggcggctcggaaacagggcaaggtggcatacgacggcgagatgttgttccagggtgtgcatgacgacgtggtcatcaccatcaaggagtaggacgttctcaagagaaaagcgagtcggtgttagggtcgggagatgtttatgggattcgacgagagcgggacgggtctagctgtggggggtgacgatgacaatggggaggcgggctgccgtcagagatgtgatatcgtatcgttggaatattcgtaactttggctcgtcaaatcacatccacaaacacacatcgtagaccgtgctacagatctcacgagttgcaacttgacctgtcttcacgaatcgattgacctaggctatgccgatgacctggttcagacagagtcgtggttgctcttctcgaatgagtgggtgatgatgtccggaagtattttctcaactacatttgcttccgtcttcttcccccgttcggatgccacgttgatgactcatgaccttcacggggatgcacagcaaatgacatcctcgacctactttaacctcgacctttttgctacttccctatccactctggacatcccacatagacagacagccttgcagtctacttttcaaggtgagtgggtttcgattttgttcccgtctcccggtatcccctcatcgccgtcgtcaagtcgctcttggcggggtccaaggagaaacgcaacgcggaaccttctacatcacatcgaagcaagtctcggtcgggaccgagagttgttcaaggatgaatcccatgatcgatgtcggtgtcggcttcgtctataaacgtcgagaccttgtcaatcttggttagacgaggcgagattcgctgccgtcaaatcctgttctgcggcggtacgagacggcgacgacggggatgggggggaaccgagaatggaacgtgacgagacagagccagggcttcgcagctgacacgacacgaacccgtcctcggtcattcgacgacttgcgacttgcttcctttcctttgttatatgctgtacacctcttcatccttcgctcgacatcccacactctactaccacactataccaaattctccgtcatactctcaccgaggtcacctgcacctgtcagcttctcaccgtacataaaccaacctcgaccgaatcacctcttcaccatgggcctcgcttccaagatgggcaagtccgatttctcacctcgaccgagacgatatcgcacacgatgtactcacctatcctcaaccgcttcaaccctttcgaccggtacgtagctcttgccaacaaggcttacgccaacgtcaacgtcggctacggcgggcctcctcctcctcacggccaacctcaacctcagcaagggggttaccagtcatccacccccgcacctggcgggtatagtcaacacgttcagcccactccttatggtgccggtgctcctcctcagggtcagtacggtcaaacccaaccgggtcagatctacggtggacacccccctcagcaacaacaacagcagtacggccaacctcctcagcaacaacaatacggtcagcccccgcctcaagggtacggacaacctcagggtcaagggcagtacggtcagcctcaacctcctcagggacagtacgggcaacaacctcagggtgggatgggggatcataggatgatcttgactctcctccaaaactgcgtgcgggacgtgagtcaaccggacccttgcacgatgtcattcaagtctctcgtcttgacccgtcctgatcttatcaatctcgttatcaccccgtctgtcactcgccgtcctcaccgtagcaacacctcgaagcgttttaccaacctcaagcgctggaacagattgccgggcggatcgcccagtccggcgctttggacaagatctgccagcagtggcgcttgcccaaagagctcggagcggacctggtcaagatcgcgctcttcgacgtcgtgctcctctgtgacgattccggttcgatgcagttcgagcaaggtggtgaacggatcgaggatctgaagatgtgagtcttggcgcgtcgggtccgtgtgaaaaacgaggactccgggttgatgggtgagagcgttctcgtccggttcggttaggatcctgtcgagggtcactttcgccacctcgttgttcgatcaagatgggatcgagatccgtttcctcaactctcaagtccaggtaagtcggcctccgggcgtctcgattccggacgttatcgcaactgactcgaaatcccctggacctcgcctcagggtaatcacgtcacttcggaagctcaagcctcgcagatcatctcccagatcaggttcagcggactcaccccgctcgggacctcgctcgaccagaaagtgctccaacccatgctgttgcatccggccagggctgggcagttgcgcaagccgctcttggtcgtcgtcatctctgacggagagccgacttctgaaccgcctgacgcaggtccgtggactttgaacttgggctgttgatctggctgtatgcgtgggaggtaggctgataccttgggtgtggatggtagtcttcaacgctgtcatgagggcttccgaggagcttcgtcgatcccgagtgagtactgatcgatatccctgtctatatcggggctggaacggttgctgatgccatgtcgacctggtagtacggacccgactccctttctctccagttcgcacaggtcggtaatgacaccaaggcgcaagcctttttgggccagttggactcccaccctgtcgtcggacgtgagtcgacgttttgcgtatcaacaggaagaaggacaagggatgacgagctgatctttatttttgacgatagccttgatcgacgtcacctcggatttcgagtacgagcaggatcagatgatgaggaccactggaggtgagccgggatgatgtccgtctcattttggtcgggtttggaagactgattcggctcgatttacccttggcagaaaacctcaccggagagggatggatcatgaaggtgcgttgtgctaggtgtttcggttacgctgactgattctcggatactgatcatccgtcgacttgacatgtcagctcttgttgggttcgatcgattcttcctacgataccaagggtgagtctgaaccggcatttcgtgaaatacctcgcaattcttgctcatattgaccactgctacagacgagcatcgtcgtcgataaatgggtctcgagatacaacaaggttgcttgaggatgataggcgcaaagtgcgactgtgactgcttccggatacaagtaaccgttacaacgagtgtgtctggttcggatcggaattcgttcagagtaatgaaatgggaactacgaatgggacttgagactgtttgtgaattatcttatggcctatggaaacatgtgtgattggatggatgtctttgttcaagaccagtgcccgcccattcacgacgatatctcgatgggagatggtcgagcgatcacgtgaaacggatcatcgtgatcgagatgtccaccaggcagggtgaaccaatacctaccggcttggacgagtaccgacaattctcattatttcctttccgctacacgatacactgtctctttgctatctggcaagtgacttgtactacctgatttatcagggtagcgttcgaaccgaccatgtccgctccgctttcgccaggctatgctaccaattcggacagctcggctaattcgtcacctttactacccttcggtaacaaacctctaccatcgactaacaacaatcaacaagctgaagatgatgacggttggggaccgccaggagcttatgatgagggtagccctcgatatggatccggttctgtcgaccggcaagtccagcctggcgacatgactggacaaaacgggcgtgatcacggtagacaggagtacgatgagtccgttgggcagcctgaggcgggtccatccaggaagcgacctcgtctagacatcgacagccctggggatcattatcaatcgtactcggggactcctcaacctcaaggtcatgcgcaatccacgtctcaacagaatcaccagccacagcaccacgcaccgcacgacaatggcgagatgcagcaagagatcccattccctcaccaaatgcccctacccgacaattctaaatcgctctacctcactggaatccagcatcctgacattcagcgacggaaaccgtatcacccggtcccgaggatcatcatgcatagtatctttgggtatacgccgcggaacgagatcagtagggagattggggattggttgcttgtcacgtgtgggaggttgcctgggaacgtcgaggtgagctcccctggatgacgaggatcacgtctataggggtttctcgtaggtacgggtacttatcgatctcggtcgggctgcgcagatcgagatcaagtttgggcgtattaccaaacgaggtagtccggagcggttacggttgccggtcaagactgaagtctgtacgtccgtccgactctgagcatgttttcctcctgtcatcatcaccgtctttgctcatgtgcgttccgcttcctgtgtttctagtgattgacgacggcgccatcgagatcggtttcagatctgacatgcccgacgtgagtcctgacccccttccagaggacgccatgccggtactaagctgaaacctttccatcgcagtgggcacataaatcgatgaacgaaatcctcaacaaagaggtagagatgaccaacaacccgtccggtcatccggaacatcctcctcattcctaccaccaagtcgtgccttcgcacacctggacggatgatactttttaccctccactcatcctccccggtcaggatcccatccccgatcccaacttcgtgcgacatttcggaaggggccgaagaaggttgtcgaagaattcaaagacgaacgaggtgatcgagtgtatgcaaaaggtcaagatcgggaacgtgcacgtttattgcccgttggaggcgtttgatttccgggtgagcgtgaattgcgaattcccatgtgagttcgggggactgttctcgcacggggcaggatacgtcgaggtggatcgtcagggggctgatgtcgttcgggttgatcgtatgcccaaggtcaagcgccgtcgatagacgagaattatagcgggttgaggaaaaaggatcggatcacttacaagcataacatgttccaaatcgatctgacccaggtcaagacgttcgaggtgagtcttgttgtattttacatcatcatcgcatcgtacttccgacactgaccacgcgtttcgactttcaggacaatggttctgctgggaaactgtctcacgaggtggaactggagatccacgaccccaagaagctgctccaatatgggtacatgagcaaacagaatagggatgtggagaaccggtgggaggagacgatggattccgtgatgaacacggcgaggttgttgaacaggaacgtcgtcccgcctccaccaccggcggcggcttcgaatcagcgagcatcatgaacaaagggggatatagcataatgatactaggttgtgatacctgtaatagacggtctttgtgggaccatgagatgaggttgcccacgaggtctcgcttcccaggatcccctttacctgcgcttccccccatttccttgtttgtttttgtattttctcacgcgcgtctcagatttcgagccaaagtcgaggtcgaaggtaggtagacattgattgacaaggtcaagcgagagcaagagcatgttgaacaatcatcaatcagctatacctaccctctcaaacaccttgccaaaccagcttcgtactcgcttggaactagatcatagtaccagttcaccaaaagaacgctcgacccgtcacgaccgcgacgagctacgcttggaaaaaaaaagggaaaccaggatagaccaggcaggatctctttttcttctctctgaaatcacgattaatcatgtcgatgagcgatatcaacccggggcaggcagtgtatgccactgacgaggtgagttttgtggaatccttcatcacggcaagtgcgagcttcgacgtggatggcagacggacaagcaagacgtcgcgaaagtgcggggttgcgagtcggtcgtcgagaggtggaatgagcaaaccaagcctcgtccacctgaagctcggctttgccagcatagcggtcgcaagcttgctgaccgacgtccttttgattatacgtagaatggtcgaccattcatcatcgttcggtaagtctctagctagttggaatcgacccagcatctctactgcttgctaagctcgctttacatcccgacgactcgcagtgagcaagggaaaaaggttcgaacccacggattggaggctattcgagtgagcaatttgatcgcctgtaatgtctcaaagcatgtgaagctgatccccatctcattccagagccatatcttggccgctcgatcaggtagatccacgcatcaccatgaccaaacccttcatttccatcccgctgacgctcagtccactttcccgctcgtctccagtcaccaacatcatcaagtcctctcttggaccacgaggactggacaagattttgatctcccctgatggcgatatcaccgtcaccaacgacggagcgaccatcctcggccagatggaggttgagcatcagatcgccaagctcttggtcgaggtcagcaagagtcaggacgatgagattggtgatggaaccacgggtgttgtcggtgagcctctttcccgggtctgtgctatcatgctcaagaaagtggaatgctcattcgatgatctgcttggtcggatcagttttggccggagctctgttgtcctcggcattgtccttgttggaccgagggatccaccctatcaggatcgctgatgggtacgagaaggcctgcgaggtcgccatcgccgagttggaccgggtagcagacacggtgaggacagggtcgtttagagttggtccgtgatctttcgaggctgatgacgggtgagatcattcggtgacatgtacagatcgagttctcaaaggacaacactgagaacctgttgaaaacctcgatgaccagtctgggaagcaagatgtgagccgcgtcacatctccccggcctgctgacccgtcacgacctcgagctgacccagtcgggacccctcgtgtgccgtgcagcgtctcgatcgcccacgaaaagtttgcccagatcgccgtcgacgctgtgctctcggtagccgacctcgaacgtcgggatgtcgatttcgagctgatcaaggtcgatggcaaggtcggaggttctctggaggacacgacgctcgtcaagggtgtcgtcgtcgacaaggacatgtctcaccctcagatgccccggtccatcaaggatgccaagttggccatcttgacgtgtccgttcgagcctcctaggcccaagaccaagcacaagttggacatcgagagcgtcgaagagtacaaaaagttgcgagaatacgagagggaaaagttcttggacatgatcaagatgtgagtgtttcgcggcgagtagccttgcgggcgggtgtgctgtcgcaagaatcgagctgattgtctcgacgctcgacactctccgtcagggtcaaggacacgggtgccaacttggtcatctgtcagtggggtttcgatgacgaggccaaccacttgttgatgcaaaacgacctgcccgccgtccgatgggtcggtggacccgagatcgagttgatcgcaatcgcgaccaacggtaggatcgtaccccggtttgaggacctgacggcggaaaagttgggcaaggccggtgtggtccgggaggtctcgtttgggacgacgagggagaagatgttggtcatcgaagagtgcgccaacacgcgggccgtaacgatctttgtcaggggaagcaacaagatggtgagtctcgaggagggtgctcttatcgggggtgtgatgggtttcttgggcgacgatgctgattttgcgtcacgaatgtgtgatctgccacagatcatcgacgaagccaagcgagctctacacgatgccatctgcgtcgtccgaaacttggtccgtgacaaccgggtcgtctacggaggtggtgccgccgagatctgcgcctcgatcgccgtggccaaaaaggcggacgagatcccttcgattgaacagtacgccatgagggcgttcgctcaggctctggacgccgtgcctcttgccctggctgaaaactcgggattgagcccgatcgatacgttggcggatgtcaagagtaggcaggtcactgaacagaaccctaggttgggtatcgattgcatgggacgaggagagaacggtacgtcgagcgcgcttgccgtcatcggcttgaatcgacgagcactggatactgatatcatatctctgcccctactcgatgtctcacagacatgaagaagcaacacgtgtacgaccctctgatctcgaaacgtcaacaattcctgctcgcgactcaggtcgtcaggatgatcttgcgcgtagacgacgtgatcgacgcttccgcctttgcggccgagtagagattcataggtcgggggggaggccccttcttgtgtgttggcttgacatgtgtgtgtttgtttgtttgtgatgctacgtaaatctctacatgacgaaacctatgtaacgacgatgagaatgggtgatggtgagggttgtgggaacccatgtcgatcgtgaccaagcctgtgccgcgtcctcgtgactcagcgaaatctctctaaaagtcgaaagagcacatgagatgagcaatccatctcacacaggtaactcgttcgaaatatcggcaaccatctactactctctgtgaccctcataacaatactatcttgaccagctcaacctcggatcatatcctggaacgatcggtatttgatccggaacgaatccttgcagctggactctcgataacaaagtcaccacgaccaacgtctcaccttaccatggcggacacctccgacttttcgtttgacccgatcgaggatgccctcgaagcattcggcaagggagaatttgtcgtcgtcatggacgacgaaagtagggagaacgaaggtgatttgtgcatcgccgctagcgagatcacgacggagaagatggcctttttcattcgacacaccaggtgggtcggtcccctgaccctcgtccattggggtcgtttcgctgattcacgtgtcgcgggaacagtggttatatctgcatttcggtaccggaacagcggttgaaagagttagatatcaagatgatggtaccagagaaccaggaacgtcacaagactgcctataccgtgaccgtcgatgcagcagagggtgagccgccctcggaccctatacacctgatccaacttccccatgctgaccatcctgtcgatcctccgcccgctcgtaggtaccacgacagggatctcggcacacgatcgagcactaacggcgagaaagttggcggaccccaaggcgacgtcgagcgatttcactcgaccgggacatatggtacctttgcggtataccgaaggtggagtcctctcacgtcggggtcacaccgaggcggccaccggtacgtctcaccctattcctcgactctgaacattgttggttcacccgggggttgactttgactttgactacttcctcccccctgtcctcgtcctcgtcctcatccccaccagatctatgcaaactgactggactccccgcggtcggcctgttgtgcgagatcgtcaagccggatgaccctatgggatccatggctcgacgggacgattgcaaggcgtttgcccaacaatgggggtttaagatgattagtatcgatcagctgcaacagtatatggagaagaagcaggcgggccagtaggtgtaaggtataatcgagatcgactttggaccgcgacgcatgcttgaatacgcatagacacatttccaaggacattgaccgtcgtcgttcgtccgggtaaaacattctcttcctcttcctgtgcgcgaccccgacccgaccctactcgcccacgttcggtctgctcagactccccgaactgcccccactcgatcccgagctcttcttcttcttggctccgtactctgcctcgatcgtcaaccgctcagtcttgccgatctgcgctccgacccagacgagcagggcgagcacgacgatacagagcaggaacgtcgactcggccatctcgatccgggctagttcactggcgatcgcttgggggtctgggttggggtttattcggaggcagccggggatgtcggctgcagggtgacagggacgtccgggttagggatgggcatacgtgggggttggtaatctcggtactggggatgtctcgcttgtggttcgacttacgaggacagtatgatttaccgggcgagcgagaatctgcgagaaagatcagcgctcgaaggaacgcccggctgatatttccgtctaatgccagctcacagctgacttgtcgatacatgagttcacaaagtgataggaataggtttgtaggtgattttacagacgttgacggcacaacactacgatttgcacgcgtcgtccaagtaggaaaaggtagcagatgcttattatggagacgggccgcatcctcatggaacacctcttgaaaggaagacgaggtgtgagatgaaacgcgtcgcaaacgccatgcacagctaaggtccgatgatcgcgacgccgttgaggcctaaaggggtttcgcggaaattccagatcctgttagggcagtggaccacataattacaatcgactagcgagttcggctgctcaatcgcgtcgaagtttggggaaatcagtcaatcttgacgctgttaataatgggtcgcttccgacgcgctgcttggatagtcactacaactctgcgacagatcggatgcctggtcagggtgtgtgtcactttgcctcacgaacgtctgcaaactcaaacctggacagcgaaccgcctgtgtaagccgattccgtttgacaagcactgtcctgaatgacggcgcggcattctccgctaccgggatttccttccaaggcggatgtggctagataccctcgggattgctatggcgtaagggaggctggcatcgtaagctgtcggacacagagctcgttcagatggtacgtcatgattaaagatgtatatggcagatggctttttcccgataggcctaacgcgcttggaaagagactatttacccttcccgcacctccttcgagcgcagcgggaaacggacgaccggcatgctgacagtgtccgaatctggcgccgcttcaagacgggccttgtacacggaagatatttctatatcgttgatcttggccagtgacagtcgcaaaaagtgactcttcaaacatctccgtgtcgaacaacggagttcatcacatcagtttacagctgtctgattgatcgcgtgacggtgtcgccatcgagaccctagacgccgcggaacaaaggatcacaagcattttcatttgggcgctgaccgctttatcgtttcggctgtgattgcgagtgcagataaatacggacaaatctactcgatacggcgtcccgagtatcagtcgccttctatactgattttttcgccactctcgagctcgctgatcttgtgattatacaaccgaaccgaaaatctcctcaatacccaaacgtggaaagatatagaagaaagaattgcaaagactgtcaataacatgaacagtttcacggatctcacgggcccaccacccaccactctcggaggagcaccgccccaatctcaacagatcatggacgatttccttgacccggaaaccaagagtctgatcaatactatacagagctcttccttgcaattctctttggtttccctacttagcgagctacagagtcttgcgtccggcccattgggagatggtgattggaataccgcacaccgaatcctcgacatggagaaggaacgcaaacgcggatctgttcccgacggctccggcgctgaacagtctggtcggaagatggctcagggctcaataagccctacattggtcaagttcttgaacctgtgggacgaggcagggaatgttgacaccttagatgtcatttgctgggcgttctttccgaagctctacgagaacgataaactggtttacgaaacgaagattaagatagacatactagacctgtcggttaaggctacggcccttcaggaaacgaagaatcaggctttgattccggtcctagaggttttcaaggagagggaacttcggcgtttgaccgaggacttgatggaaaagaacgagcttgtctggcaaaactacgcgcagcactcccggttcctccaggcttgatgtgcacgtggcaaggctacccgagaccaacgggaaatcgggatagagcatgcaatgaaagcaattgtaatccattgatctacgaaagcagctcatactgaccgtcttcgccggtgtctgatcgagaaaaacaagtgaaccatgatctgcgtcacttcccgagaccgcagccaagagcagccaccgcccagtaacagcaaagccttttttgtcctaaatgatgttttacatgtccatgaggtgccactttacaaatgggaagacgaatcgagccacaaggccgggacgaggagaccgacaacagggacgagagagctaaagttcctttctacaacgatatttggtgaatgcgcgcgtgagtatgcaaagcagtatgcctgggtggatgtcgaatcgaaaaaaagagaagccggcgaaagcgaaagcctaggcggcgcgtgtggtttgagagacaggatccatgattgaccctgagaggcaacgacccgatcgattagactggtgccgtcttttcgtgcgctttcgtatccggatgatttggatgaggtagcagcggcacgttgacgagatgcccgtgtgtcgaattgatcgatcgttgaacgtggtacttgagaccgtttgcctgaagcgccataagtaaggttgaatcagcgacgatgcgaaaagattcgaacggcatgtctaggtgcgtacctgtcgataactcttgttgcaccccggtacggggcatcgatactttttgaacccctcggcatccctcccatcgtcactgctcagctcgccattctccttggcgatcctcctagcctcctttttagcggctttcctggccgcccgttcggccttttgttccgtggtgagcaccgtcgaccctcccagtcgcgggggtttcccgatcgctcccgtcccggcaccgttgaacgcgaggttgacaccgttgagccctccgacgggggttcctggtttgctgacgggttgcgatgccgtccccgattgcgaattgacgcccggtatagcgtaggacaatttgctcggctcgacacattgtgggaatccaccgggtgggggttgttgtgcctgttggaacgccgtccactgagccgagctcggaggcaagatgctaggcatgttccctcccgatcccgaggcgcctacgatccctactccggtcggatcgtcgtcgtccatcgtcatctcgatgtccatcattcccggcgtccccggcgcgtcgctctcggtcggactgctctgtttcgtcgtcatgctcggtgcggtcgacgacgacaggggagccggttggggacgtgacgagaacggtgatgccgtagggaacgatgtcgatggcgtgcctgtacgtgagatggcattgatcgccgggttttgtgggatgatcaggttttccgggttggccccagcatcgatcgacatggactgtttcctcaagtccggtgcgaggtggacgtgacattcctcgtaactgcgagggtcgaacgaggatgtatgattagcacgttatcccggacgatcccagtatgtcaccaaaactcactgctcgagcaggtcatggagaccacccaatttcaacccgcaacaggtgaaatccctgacataccgcttctccaactctcgactcctctcccctccgaccccccatgcacctccgggtccgccgtgctgcatcatcatggcgctattcaccgaactccccgcaggtcccggtccgatctgcatgttgggatcgttccccatggacatcccttgacccatcatctgatgacccctgctcgtccccaggaaggaacccatctgggtaaaactcatcccgcccgctcctccaccttgtccaccctgtccacccgggccgttccaatggtttccatacccggggctgatagacatgcctagccccatcccgcccatcccgatagatccggggaaattgtgatggttattcagcaatgaacccatccctgtcagcgacatggggatcccggtctgcgagtacgagtagccccccgtcgaggggaggacgaacggttgagcgtacggtgagaggttggaagggaacgtcggcgagttgtgaggctggttaggaaacgaaccgggttgaccgggatggtaatgcccgttcatcccgttatccatggggtgttgattctgcccgtgatgttgattatgcccgaggttgatggtcatcggtccggttggggtatgaggactgtggatcgtcgtaggagatgatccgccggctgcacctccacgcatcaaagcactgagagcgctcatgcctcccgatccagagttggaccgactgggcaggttggtaggtgagatcgacccgaacccttgtccgttggagtgcgagtgagagttagggttcgggttcatcccgcttgggtcctcgtccatgcccatgcccattcccatattgatattcatcccattcggatacccaggtggtccggtctgttgggtgttcatattatgatgaccgggattatgattccccgtctggatgttcatcgccatgatgagatgagagctaccgggggcgcgtacgtgatcctgattccactttgatcaggatcaggggaaacgctgatgagggatggtcgactgatgaggtctctggtgtcacggagactgtagctgggtcgttcccggtgtcgaacgtcggtgcctgacgtcgtatgaacgacgatgtgggtataagatgatggtttcgaggctatcacgtctggtctatgctcgatcggggtttctcttcgagctcggaaatcaccgtgaagttgatgataactgatggcgaatgatattatgtcgaaccggggagaggtggggatgatgatgatgatgatcgatggtccgggctctacgagaagcttgataatccggtggtcgccgccttccggctgagctagcttgttgacgagctgtgcgactcgtccttttctgatgtggtggcctactaaagcctccttagactgacccgacgagcctagtctggatctgaatgtatctcctggtattggtcggtaagattatcgtggttgtgtgtacgtgaggattatgaacgatgatataggttcggtcgctgctgctgctcttggctcgggttcggtctcggcttgcaaccggcgagagccaacacacgacgcgggcgaatgataacctcgcgttgggaggggttcaagaacgattgagactagttatacaggcagtgtcacatcagttcgatgtacatgcgaggagaggagacagagtgagaccctgtttgtatggattgtctcgaaacggactgagttggacatgattcgtcgtcgataccaagaaaggtgaaccgagcgcgatcatttgccgcatacaacgccgtctcgttcgcataggttactttgattgccggggcatcccaaaggctcgatagccacctggaattccctttaccttgcgcccacagacacagtaatatgccaccatcatagctgcaatcctggcccgggagttgctagtcgtgaacggccgtgatcgaacttcgagatctctgaaccctcttgaaattgcccgatcgggtgatttccgttcacggaagtcgtgaaatcgcggaatcaaaaaatggagcaacgcatggaggtcgaagcgaagccacgggaccgatcggggaggtaggtatatctgatatcactgggagtctggggtatatacaagtctgtctaaaggaccaccccgttccccgctctatactaattctgtatcattctgcctttccgtcatcagaccgccgggctgagttgattttctgcgtcacacgcctcaaaggacgagcgattttcggactcggtcgtcggtctgtatcgcgcccccaggcctcgaaacacgactagattccggactcggtgatgcggttcgtgccccgccttcagcatggctcggcgtggagtctgaagtttgaggacttatcgcgcttttcaatgctctgagtacgaatccctgatcacgctcctgctgctccgttgggtcctcgatcattaggaagccgcagagagtccgaagagcatctgcgacgccctcggtctggatagagtttatcgttgagttcaaatccgtatgaccagaagcttctgtagcgttgattttcgatgcagtgtcgagctcatcagagcgtccccgaacgtatgttgttacgaatgttgcaaacgaaggtggcggtcgctcgttgggcatgacgggattaggatcacgctggatttgttgatatctatcaagagcaccgtacagtttgaagttgacgggaaaaagaagagttccatgatggacgccatacgaggtttttcttagtatcatttatatagatatcgattggcggtccaagttgcaatatcatccgtcggcattgaaatcaggcaagcttcctttgccaccacgcgcgttgataaaaatcaatatgctctgaaacagagtctattatgactactgctcgtggacaatgacgtctctctgttgaggtttaggactccgggaatactacgtttttagctgtaatcgaaagtcgatacgtaagcgcaaacagcgcaccatggttgcgaatgatggcgtgctcctccagtccaccccggcgggaaattaccttgaaggggagctcgtgattatgataccgctgacaagagccgtgatttttcgtggccgctgtttcgcacgtctatgaagccggcgtgactggtcacggtcaaacagttgtgcttcagcaatgatcaagcacgctcaaacctgtcttgtcgataatgccattcgaatacgagaatcatcaggcggtcttggccgactctcggttagcttggccgtcgtgaaactattgatcatttacaatagctgtcccaatcaagatggtcgaaggatgccatttcttttctgcttagagatacggtcctctgcgtctgactcccgcgtgtccgtgtcctctcgggccgcgaaatgaggactccgcggatgataatacatcagcttgggatccttcaccgctacccaaaaagcggtactcttcggttcctcttcgctctttcgcgcctctcgtaaacgcaggtcattctccctcttctcagcatctttcaaaaagacgagggcgcgacttagtgtctggtctggcgtagcggcttggagtttgagatcccgaaacaggttctgaacgtccacgaacgatggtcctgctcttatggtctccctgtgatactttttgaagatgttttcccgagcgaccgtctggcctacttcgcgccattctcgactgaaggcatcgacataaagccgcgtcggcgccgacaacccaaaagtgacccctcgtctagctccttcccgctcaaagaccagtacaagggctcggtaagacgtcgcaagatcatcgagagagatttcctcttccttgcaaatttttgtaagcgacctgatggtttcttgcgtggcacgagcgatagacttcgcttcgatccttcgcagaggctcgctatccgcgagatgcgtcaccatcttgatgtttggatttggcatcatgataggtttctccaggtctagactgtgcggataaattcgccggacgagataagaagttaagagaggagaagaagtctatcccttccctacatcctgtccctattataaccgtcttatgagactccctttgtttacactgacccttggtacaaaggcatctttgggcctgacgtcacccactgcagcgctcgacgagtcttacaagccgtttgaggcagcgcgccatagtgaccagacatggctgtgaggtttgcgtgtgtactactacaaacgatttctttgaagcgtgctacaagtcgatcagcggtttctttgctgagttctagctcagtctcggagcctcaagtcatagataccgagtatcgttctattcaccctgagtttgcgcgaacgatggtggacttcgcgggatgcgaacgatggcttcttttgttgtgaacgccctcaccaggcctacaggaggcgaaaagggctctgcccgagcatgaggagcagtaccattgcctatttgactgcttcgattgggttgtttctggctgccgtttctatttggtgtgtcgagaggcataataagactacggtacaatgcttaaccaggactcgtaaccgacctcgaagggataacggcagagtcagccgatctcgacgaaataacgcctcctgtaccaacgcgaatcccaattcagacctgacttttgctaggatcgacaatagagatttaccgatatgacgagacgaatgatgtaggatgcactggcatgacaatcagggatactacccttcttatcaggtcaaaaggaggttcgctctgaaaggcgtcgaaaggatcgaaagaacccgcaccagactgctataaggccacagaaaaaaacactggccgtgtgcatgagtcaaagtaccgcacccccgatcgaatcgctgcctcttccttgtcttctgccactcagtctgacctcaacatatctcaccatgcactggatatcttgttttcaaactccgagaaggacgacagtgacattagacctgcagcccggaccgtgagcactgttctgtcccagaagaccgcgccatcttcagcttcccgagactacgctttgcgagatcgaatcggcggagatgtatccgtcggcgatcatcgtgattcgaatctggatctggatgacatcagagctacaacgacgatggctagcacccgtgcagagggaatgaagttcacgtttgagattccgcctggcttcaaaggtcgctatgtcgtgagcatagaagatcaacccggcagcgcttcgttttgtgaagaaaatccgcccgagatcgggaaagtcggtcacggctacgaaaagtcatgtactaactacgttggcattttccttattcaatgggaaaaggctccagatcgctcgaatcgcgaaaggctgatcaatggttatttgatggctactttcggcaaagatcaaacagcagacgggttttgtgaatcgttggagcttggacgtcaggcagggcgggatgatggctggaaattggtccaggcgtttcgcgagatggaaagaaagattggcgacgctggcctatgggaatacgtcgtctgataaggctacttttgatgcactgcggcataatactcattcggcgcgatcgattatggcctccgttcgctaagtcggtcccaataatgcaaaagccagcaagattacatcttcagtcagcgtttatctcaacgatcttcagcattccatgtcttggtcgatgcaccgccacttagcgtatacgtttcgcatttttcacacggcggatttcacttcggaatggttatcgcctgaaaatcgacacataagctgtatcaccgcgtcttctcagtaagatgcctccacaaggattgagatggccatgggacgagtggaaaacggtacagaaacaaagaatcaccaatctatgacgttcagtccaggctcagaataacttaatcgaccccgtacgaagggtttatcgaccaatcattgcagggtgaccgagacttcatatgcgatcaacttttggttcattcgtgggatgcggctcggctaccagtacatttcatcctatgttcaaccttcgaaccctcttccctcttgaactttcctggcgacgggcttctccgagtagcatcatttgcaaacggaatctgtcagctggatgcccatcttcttgatttagagtgcctttcttagcctctgcatccagcttcaatgtgttcgcgatcagcgactccagctcgttgctaagttcagcactcccaaccactgtttcgcatactctacgcagaaaaatgacgagggtggaggcctcggtatgcgcctcccacttttcccgaaaacgtttttgttcgagaatgtctaaggtggaagaattgacggtctctctctgtacactgaggccagcatcatctgcacccttcagtgctcgggcccacgatgcctcagatactgcactggcttttgcaagaatctcatctcgctctgattcggatggaactccccaagatgacgaagttggtgagatcagagttcggcgatcagactctttgctgacgtccgacggcggtgatacgcgaggtttatcgccatcgtagaggtccgagtatgctatgatagacgtcggcggcagataggacccgccagtcgtcgtcaccgcgggcgggggcttagaccggaaggtcaatccgagtctggagacgaaagagccgatggaggagagactgctcattctacttgtgtggttggcagatttgttggacgcgagggccctcgcgataccgcttgatccgatgaatgaaattcctttgcccccgtggccgcggccgttttacgatgagcaaatattgacaggccgtcgttaagattattgatccagggcctcggatatcagccgtttccctggctccataatattgtctcaaccttatatattagatcactctacaggcaatggttatgccacctcctttcatcggagtcgaaaacattcgaattccgccaagtcaacctagaattgtgcagtgacggtgtgattgggggtcagccatctttccgactgtgatgcggactacctcatcttatagattcgcaggcgctgctgtacttcgccaagatgcagacagatcatgtccagcggagatggtttcaggcatcattcgtctatccaccttgtcctgctttagctcttgggatcgacgtcaatccgcgtggcaaggtttccgtatgacttgctaatcaaagtttagggaatcgtccatgtagcgtgtgggccctttacggcaaactttcggttcactgaatccatcttactagcatggagagcatgccacaagcttcaggggtaccctaaatcgaaggactcatgtttgccaaaagtcgagctcccgtcttcaaaggaacgatggatgacgctatcatagacatgctcccgacgttggatcaaaaacaagcctaggataccgtggtccagacgggcactcgcgatgcaaggtccgacatagggcctgtcacagcagctttagaggctggacaaggcagtagaccgcgctaaatcatttctcgaacatcgacctgtttgattccgcactatttgtagccgaagcccccagttccgtggaccagaagcgctcatcaccaattcttcacctcagaacctatgaacgtatgaacgtatagtagcatgggaacatgttgtttgatactggaatgggtggtatgattggaccgcgacatatcctacttgccaatctcccgactgacaaaccgttcagttggggccctttcgggtagatcgcggtgcaattgttgacttcatgtctctagcttcaactaaaggtactgcatgggtgaaaggacatttcacattgcataatctgaagtattcgtacctgtcataggaggctagtcgaatcagaataacgaggtgctaaactaaggccctcgaatactattacgtcctcctttcaagagatcagaagctggatttccacgccgatgttggcccatacccgtggacttcccgacctcagcaatgcgatacaacgctgatggtgcgacttgtctagtaatgcgtgtggatttctttgttctcacctcccccgtctctttcttaagggccttctgcaatgccgtacgcgtacgatcgatagaatcacctacgttcgcgtgcattgacggattctcttgtgctggatacgatgacgatcctgacgcggatcccctccgatccctcggatgtgtggctggggcggactcgatactatccagtgtcgtaagaggctcatcagggatacttcgagcgggagttgaggtcgaagtcgacatgaggttttttaggaacgtctctatactgttggttatatcggtacagaagcttcgaatactagaaacagctgtggatcccgtgtttgatcgacccgaaattgatttaattgatcgtgtactaattgattgccctgtgctcgcataagacctcatattgagcttgcgttctgttcacatctgtgggagtacagtaggattttcagagcgaacgaacactcgcgctacgactcccccccaatataacacggaaaaccggatgaaacattgctccagcccgcttttgaccactcctttcaccgaagagtcggggaagataaggacggggtctcaggattgttgattcagacatcgcacatgaccgctggggccgcaacgtggcagagctacatgcgtcatcaagtgattttgctcgatcctgagtcaggataaaacaatctcgacgataaccttctaggcaactttcgaagcagcttgtaatgccgcctgagatctatcccgttctcgcaattcacaatccctgtaaccccaaaataaacaaaacggaaacccccttcctgatatgggatgcaggatcgtcatataaccattgataccgtgccccattgattagatcctggacggcgccaatcgtatcgatcgtgctttcgattccaaagactaaaagtcgagacaatcgcacatattttctcacaacactgtgactgcaggacctgtacgtgtcatcgccacattctgcatggcagcagctaatcattcgactcttatataccgatcatttggcctttcgattgttccagattgccattatcgacctcttcgaccgcaaagactcttttcctaaacggtgctcccgcctctcaagcggtgctggctgtgttccaggctgactcccttgatcctgtgtctttgcctgaggttcggaaatatgcgtatggagttgctctaccagcaaatcgagcatttctttctcttgacgccaaggcaaagtcgattctcccctcttctcgatgggatcgaacataatgtggaatcgttcccaaaaccacttgtggatctgctcgtgattggttgttgtgtttgggcatacctgattgaaatacttgcgagcgagttcctgtctctcagcgtggacacctgtacccgcccattgcgtgcagaaatcagcaatagtcatttctcgagactgtggtccggtaaaactattggacgtgtcggcacaagtcgaatgtgtgacgacggatcgccgatcggcttgaccttgtcttacgtcggaggacgcttgttgactatgtggggttgcaaaggaggaaagagtccggtcgtagccgccgtcgtccggccccaggccatttatgtttgacccactgacgtcgagattctcttcatgcgaagccctcgatctttgttcctcaacagggtgatgcccagtcgtggggttgaaggccttagaggaggagctgaaaatgaaggaccaacttggcatgttacaatcacactggtcaacttcaatagcagctgctgtgctcgtgttcgattcgtcgcgatcctgctcgagtctgcgcaccctaggttgagtatgatatatatagacgaactgctgacacatatactgaatctccccgactcctccatattgcgccatatgcacctcctttgagcaaacctccgcgatgacgaccatcaccctccgggtctgtaggctatcgagcccggcgatctgcaaaacccgatcatctccgggctgatgttgtgacccttgttccactaattaggcaggctcggaaagttgggtttgattctgcttaggatcgtccatctcttggcacaacgccattaagtagcacgcctttgtgttgatcaaaggagaaacgcaagatcacgcaactcgacgataaaccatccgtatttgaattgattatggtatgcactaccacgtaattacaatcaacatatcgtaacggtgatctcagagtccgattcctgcctcgaccggtctatcctccgattatgcctgtccacgaacaagttgtactccttgcgttgttgctcgtattcgagttctgcctcttttctcgcctttctttgctcaggcgtttcgttctctgtcttttttcgaggcttctttggaggtttcaaggtcctgggtagaggatactcgtttggctctttactggatgtgcgttgagagtcgggaggaagagctctgtgggcccggggtcgggttcgggattgcggggtcgatctctcgccgtcctggtatcgacggacagattttattcggggagtagatccctctcgatcctgtctcgatttcatggaagacccatcatcccatgtagaagactcatcaccgtcggaagttccgctgctcgtcctccctgactgtctccacggattaccgctcgccatcgtccccataaggctctcaaacggcttcagaaggctttcgtatgagctatcgacgagtgaacttagacgtggttccccagtacttatggatgaaatcgtatctatatcattcgatgacaagtcatgagattcaccacggccggatcttctcgacccgaagctgaaagatgagttgggcatgacgagtgacgacgcgactctcagagttctagaacattttcaccgactcgatcggcaaggatgtcctgcaggtctcctatcagtacctgatactatgcctcactcacctcctttctgtcagacgtgagaccgaaatgggtgtggaggggaggcgtttcgacgaaaacgaatatccatcgcgtcaactgaaaccaaggtcgcgtcgatgttgcatatgtgtatgcgtcctgtgagtcgatcacgtgatcttcccccaacgttgacgcgactcgcgactcgagcgaaggtccaggtcgaggggaatcatcatcatcatcatcatccatcattcatcatcactaccttctcagaaacacttgaacattcatgtctcgtaaatgcaatcatatctcccttcctaaactcttctctttccgctcatctcggtgaaaccggtcagaaagatcctccacccgtcgttcgacgacgaatagcgaattcaacgcgacctcgacaaaacaacaagacaaaacaaaaacaacaatcaaactcatcaaccgacctcatttggtcgaccaaacttacgatatcaacacgtacgctgagagcattccatgccggtagagagaagggatacgttattgactactagtacgagtgtcaagtgagtcccgaaacgagaccggaggtcagacattccaggtcgactgtcagagctgattctcgggatcctcctactttccattccacctcgcttcttctcagcgccgctctcgcgatggctcaagctagacaagccaacggcatgcctcgatccaacggtcgtcagaccgacgccgagccgtctgacagtgacgtcccgccttacaacaaacactctcaatccacctcgaccacctctgccaaacccacgagcacgaaaccacgagctccctccaagacctccccgatcaaggggaagaacgaccatctgtccgtgctcgacacccgtcgttcggaacgtaccaagagccctgccgaacagcttcaagaggccatcacccagccctttgctcatcggttctccatggtcggaacgggacgcgggagggggttggcgagcgggtcgaggtcaagtctttcccccccgcattcgatgcataacgacacgatgagcagtgataggttggattccgtcggagagaacacgaccaacgatttctcgaggttggaaagggaggtccaggcggaacgaagggatcagcatcaacatcaaccccaacatcagcattatcaacaacctcatgaacccctcccttctatcccgtacaacctctcccataacccgacttcccagaccggacgctctgttcactctcatatgacctaccagaccgtcacccagaatagcaccacgcgctcgcgtagcaagaagaacatcgacgggaaagcttacgtgtataccgaggaagggatgagtgacgatgatctctccgctatgggagggcttgggatcgggatcggggcgcacctgcccgtccggtcgaccaggttgtcttattcgcaaccgactcatactcgaccggatcctatgcagcagaatgggcggaggagtgtcaatggagctggagccggagctgggaggactggagcggggtccgagtcggacgtgccttcttccctctctgggtctagtatgcgtgatcacaaggatgacgagctcgaggaagacgtctttggggggtcgagccaacctatccgacagggtcgtccagggggacgtctgttcaaccgacgagcccagcaacaacagcaacaaccgcctatgagccagactcgacgacgtttctctgggggaagccacgagcatgggtctacgggagaagatgaagaggtcaagcatacgatgtcggggtcgaggaggaccggcggggacgagtcggacgggacgtatgcgagggaaaaggccccgttcaataggagcgtgccgaggagcatgagaattgggatcgacccggccaatgccacggggaagacttggaaacggaggatcattcttaaaaaggaaaagggggtgagtggacggtccatgatgtggacgttgagggtccgagctcgatcgctcaccttgtttgatggtgcccctgcacgtcggcgctcgtccaggttatcagcaaattcatgtcgaggatcggtatcgacgggacggacgggacttcgttggccaagctcatgggcatcctcctgctcctcgtctacgccgggttcgctctcaagcacgcctacaatcaggccagggatacgtatgaatcgttcagtgggtctcgatcggtcgcgcttcctcctggcggacaagacgcggcgagcgagacggcctggaaacattatcgacaggaagcgctcggatggagggacgagcaggcgagcgagatcaacgagatcgaggggaggttacgttcgttgacgagccaggttcagaacgccggttcggtcagcaaggacaaatgggagcgagccgagcaagagtccaaggaggagttgaggaggcttcgtgccgaggacaagttgtgggtcgacaaggaggtcgacggcgtcaagggagcgatgaaagagttgaaggaagagatgaaacgattgaagagcgagacgggcaaccaatacatcgagtccttgcgggaacttcgacgggtcgaaattctcctgcgggaccacgaacgcagcgtcaagggcgacatgtccgaagtcaaggcgagactctccaaggtcgaaaccgagatgctcaagatgtttgacgagaaactctggaaacaaaccttgacccggatcttgcctaccttcatgccctttcaccgcgacgctcaggacaacatggccgtcgatcccgtcttttggaccgaaatgaaaaagatgtttgccgccgaaaaggcaaccgatggagctaacccacaagccgttcagcctagttggaaggactttgtcgaagaaaacgacgacaagctcagggaatggatgcgacaatctcttggcgaatcggctagacataccgactctatgcactccgtactctttcatggcgtgctcgacgaggagctcgacaagctcaaggtcagcttgctcgatgacatgaaggctcgagcggccgagggtgacaagaaggtcaagatcgagctcgaaaagcttcgcgccgaggctcaccagctggctggattgcgcaagggagatcaagtacccgatcaggtcatcatggactcggcattcaccgtacaacaattgatcgaccacgccttgctcaaatactcaaaggacacgctcgccaaggccgactatgcgctggctagcagtggaggtaccgtcttgacccatcagacttcgccctcgctcgagctcgaacgaccgggaattttgggacgactctggggacgcaaagctttggccagagatccgcgcgtcgcgctccacggtgtcaacgatcccggttactgttgggcgtttgccggcggaaagggatccctcggaatcggtctcaccactagaatcaaagtctccgaaatcacgatcgaacacgccgccaaagaattggttcccgaaaaggctctgagcagtgctcctaaacatatcgagattgtaagtctttctgccaggtatcgagctcatgtccgagagctcacttgatgcgtctgctttgtacgcagtgggcgactcctgccacttatgaagaacaagccaagattgaacgtttcctcgagatgtatccgtaagtttgacaaactcgctagccacgctcgactttccactgattgggctctgttcctctacgtagtgaacatcaagccgagcgtaccgctcccaccaccggggccatcctcttgacgaccgtcgaatacgatccctacacggaacgacctatccagaccttccaggtccctcatcaaattcagaagctcggtatcgcgaccgataacattgtggccaaattcaacgagaactggggtgccgagtacacctgtctctaccgagtgagtcacgacgctgtatcgaggtcggcagcgatccatgctgacctgccatctctgtccttcgcgtcagattcgggtccacggccaaccggtctaatcgacaaccgcatcgtcacgggatgccagactgacaccggatgaccactctttcttcatcatcacgtccggtgtcggtctcaaggctcatatagtcccacggtccggcaacattacgacttttctttttttcacgacctgtttacgacccattttctcgtacctcgcgggagggcttcgtcgggcggcgactggacctcgggcaggaactatggactgggcagtccggagctacacgtctgtgatgttcgtatcacgatctcattggcactcatgggtcgagacgcttgcaactctccgcacctgtgtgatggttgcaagttgatcgattcatgatcgaccccttgattttcggagcgaatcgtcgtcctgataaaagccagcatacgtgcgactttgttgggacttcaagtacgcgttgcgggtgccagcatacgtgcgaccttgcagatgatcacagacgatcggggtgttcgtgtacgatgacgactagccaatcggcaaccatcggatacgcaccgcgcgggtggcacagagtgttatccggtagcgacggtctataccggctcacactctcgctcggacaacattcatcgttcggggcggcctttgtgctcagggctttctctgatttcgtctcgtctctgtatagtaaatcacgaaatgtgtgttctgagcatgtcttttcgcccttcgatgtgggtctcgacctatatatgtgtggtatagtctgacagatgtgtcctataatcaaaatggcattgtttccttcttgtccatgcaccgttagtctatccgcgtatgcgacgacccttcggtcaacttccaagcattctcctgtggaaaatgaacacattctaagctttccgaagcgctcacattggcgccgtatctcgtccgactcaccttggacatttcgatatattgcgggactttcaaatcggtatgtttcttgcacgtatcgatcaacgacttttgagcagtgtgcagtgtcccccgcatggcgagcaagtcgacgtatctagcggttcggaccgagtcagcacacgtgagcctcgatgcggtgaatcgctgggaagcacgcaccgcatgcattgatctttttcccaattatcccacattcgattattgcgttgaagctgtcgatgtgaacgtgaggtacatatcagcgttcgtcccatttcatccgacttgcatctcgaggtcaactcgcctcgttgttcttgttctcggtaccatccttgacgtgcttccgatgcgtgataaagtgttccttcaagacgtggaacctcatcccgctcagcaacatttcccctgcacaggcttccttgttgtgcccgaacccgatgaatcgctcgtcacaccagggaggaccgtctttcctgaagatcaggtacggctcgtaacccaatttccattcgtccacgaggtatgtcggaggataagagggagacgtccgaggttgaaaataccgtgcgtggttcgtcggggcttgtcctcgagcggagatgatctggtaaaagtacatgatcgtaccgtcctcccaagcctttgtcaattcctgcagaattgcacacggtttcaaatcagtcaaagtgaaacgacttttgaaacatcgacgactccacgactgacctgcttgtccgctggaaactctttccaatcctctggttctcgtttcggatcgctgtactcgaacgcgggtacgaccaacgctccgatcccacttctcatctccctcgccaattgcccctcttctccttcctctgcagcattgctcaaaactcccttcagagcgcctcgcaagtctgtccttatcgccaagtctacgtctagcatcatcacccactcggtcctcgcatatgctctggcatagttacgccatgcgttgagctgccgagggaagagtgaggagacgagatgtatgtccaagcgttgggagatggaggggtgggaagcgtacagctcggagagggaggtgagggtcgcagggatgtctttcgagtcgggggatatgtggaggacagctgagacgggtcctattggtggcaccgggaagaacaagagtatcaggacacagatcacatggtacgacgtccgtcataagctcgaagggaacataccttcgtatgcggtaacgaggtcgaccaaccggtcgaatcgattaggcgtgataaagaccgtcatcgtcaactcatcctgctcgaacacgccttcatgtcggtagaaaaagggaaacaccctcgacttgaactctggtagtccgaaagctttcgtcagggcgacgccatcccatgtcccactggccggtgtcgaggtgacgggcggccagctgtagttcgattctctttgggtgaagagacgagcgatttcttcccggcgagcagagctcattcgtcgggatggtcgatggaagggatagattctggtgctgatgcatccgacgatgacgagcagcaagatggtccaatagagccgactcctttggctaggcaggagcatgtcgatgggcttcgaactccgttacgttttcgttcaagcgatgcaagacgtgtgcttcgaatctagtggattaccctctcacaatctcgaatagcgagatcgatgtgaaacccgagttcggggcgttaccaagacgtcgacgatacttgaattccctagattgcaccttttctatatcatcatcacctttcgcctgatgccaagaattttcaacctcgaagacgatccaccgaaatctaatgaatttgatccaaaagacaaacatcacccgcagcttcctttggctgatcacacaagaggaagcgacgggacacgtcgctgttgattagcttcaagagtagcatggaacatggaacaaaggcgacaccaagatggatgaaccctgtttcaaggttttgcttccatgagaaccgagcagggagatgccgaaccgaatacaaggaacaaaaggaaaaggaatacgagacacccgcggtttcagtttgaaacgtgaacaaaaggaagcatagtagtgactgcatctggctcgcggggaccaaacttgaccctagacttgacgacctattatataattgattgtgcggtcaacagaacgatatcccccaggtcgccaattcaaggcgggctcgacgtccctatctcctggggatcatccgactcagtttctgtatcagtcgtctcttgtcagagaccgtcctcacgcaggttgttctgaagggacgcgatccaacatgcccgtatcctctatccaggccgcaaaaggcctcagtggccgcaagaccagtcaaaatagtccaggaattccgtattttcaaggccaagattgcggtcgtacgtgttctaacgaaaaataccggcacatggcgtatatgtattccctgacgttcctctcgttcacacatacattcatgtaatcgtggcgagggaccagggttttcctttgacacacccggcaaatcgtcatgtcgcatgcccctgcatatcattgcaaaatggcaaagctcggtcttgatctcgcttgttttcttccctgacgtattcactatcgcattttgtacaatacattcgtaatccacaagtccaacaccggtaaagatgggacgggacgaggcggtacgtttacgttcaccagtacatcctgtgggtaggacactggtacccgctagggttatcgaacaggtagttctggtggtacccttcggcgtcgtaccacttttcgaggggagcgagttgggtgacgatcgtcctccccttgaggctgttgaggcggggatgagacaggaagtaggcgggttagccatgagagatgagaagccgggttagggacaccgggggaggaaaaggggcaagggacagggtgggggacgtactgcttctcctgaacctcggcggtgaccttctcagcaatctccttttgctcaggggtgctatagaacaaggccgaacggtactctgaaacgccgaccaaaaacgctcttcgtcagcccaaccacccttcatcccgatctgctcattgtccttgctaggggacgttgtgtgactcacgactgcccctatcgggtccctgcctgtcgacagtggtcggatcgtgcgtcctgaaaaagaactctacgagctctccgtaccccaccgagcccttctcccaggtgaccttgacggcttccgcgtgcccggtgtttcctgagcagacttctcggtaagctgtccacgcgcggtggtgggggatcaacagccaaatagagtcagtaaacgggttgcgcgtaggggaggaactggaaagcccgggggacgatgaggacttacaagggttgttggcatggccgccggtgtatccggagacggccgagaacttgggaaggtgcgagtagtacaccttgaacaagtgttcagtaccccactatagcgtgtatgcgtcagtatggctcgatcgagatgtatcgcaaagacaacgaggactcacgaagcatccgttggcaaagacggcggtctcgactgtgatcgtcgaccgacatgacttgatcagcttcccggagacgtcctcaagtacgttcgacaagtccacctacctccttcaccggcattcaagctttccttctccttgatggcggtctggacggtaggtgcgggagggggtttcgagtggaccatgttggaagcggcagacgtcgtgaaaggagccaaaaagttcttcagacggagcatatagctttgagatgaagcagagtctagtgcaatgaaggtggcaatgacgaggaatgtgatcgtcaagtacttggtcatggcgggtggcgggttacggatgggtctctcacctcttgaaggggatagatgattgcaggtcgaagactgtggcgatcgctcgatcgaaagtctctgggatctggagcgagcgggggtgcggaggattacgaatcgaaatcaaaatcacggcatcgctcaagtcgcctcaagccgaacacgcggacatactattattcggcacggcactctaacatgctcatgtccgcatctaatctcgataccgaaaggctacacacctacctacctcccaacctatcatctacttttgcacctctacaaactccttgaccaagctcacaaactgattaggcttctccgcatgcacccaatggcccgtatcaaacgtctccaaacgcatgttcgggaagaacccccgggtgatgggctcgttcctctcggtaatgtacctcgccttggctcccttgatgaacagtgctgggccttgccacgtcgcctcgcccggagcaaaggggaagtgaccgatggcagggatggattccgagaggatattgagtgggatcctgaactttagagtcttggtctccgggtcaatcagactgtttgtcagtaggaattgacggatcgacagttcctagaagccacgtcgtaacggtattgagcatgctgctctgcgcgggaaggtccatgttatcagaagactcaccggctcgacttccgctagcagcttgtccgccgccgatttgctctttacccccgcatcctcaaccctttgcatagccgaagcgtattcctggaacctgctcatccaaccatcccatcagcttatgtcaggcgactcgtgcccgcatccgctactcactctttcgagatctttccccttgatgctgccatatccgcactgatcaatgtccgtaatggcgaattgtactccttgttcagtgcgacggacatgaccaccttgcctcccctatacgtaaagtcgtccacgtcagcacatctcgctccggtctctgcagaaggggaacccgaagtatgtctcacatactgtgacctaggaggttcactccactggtcaaaccgtgatccttgaagaacctcgagacatccgcggccatgtgctcgtaatcatgcggagcccggtgaggggaagtcccatgattccgcaaatcctggagcgtcgaatccggcctaccccatcagcgatgcacgtaccaaggcgagtttgagcaaggtggacgacgactcacgaggacgaacacctgcatcctcagtttctgcgccaatgtcttgctcaagctcctccagttctgcttggacccgaaaaggccgtgacagatgaccaagctctgatccgatttgacgtccgtcccctctgccgggacgtgatggaattccagagggactgtatccgatggagttcgggaagagtagtaccggaaagctgcggggggggtggggatgatccggaacgagctgatgaggcgggagaaggggacgggtcagcgggaggttgtattgcttcaagggttggaatgaaatgaccagagcttaccttgtcggccagccgaatcggctcatcattctggcagcaccgatctcgctcagacagaaagacattatcgcggtcttgttggtttctctaccgatttcttcgattcgttggggacgtagatgagcatatcctaggccatcaactatatttgcatcaaccacggctaccgaaacgatcgattcccgacttttttcttccggtgacgaatggatttacggaagcaaaattggaatttcgggatcccgccatggtcgcggtcgggtctttcgggcgcagggatgtaatcggatcgagcttgccgtctcggccgacatcgcctttgacatccgcttggagacggtgtgttgttgagggcaatgtcgcggtgagacattagtgaacgacgacaaccggataatggacctaatgaagcctcatgcgtccctttgaaagcaaagtcgaagaaccatacgttacgcaagagcaggcaagcactgaaataatcggttcgaccgtattctactaagatcgattcctatcacatctattataagtcgatacaaaagttcgcaacatcatcctgatcaccgcaccgcactctgctctcaagccgaccaagctccgacaagggcaaacgacatggcgacgaccatccctgcccagacgcccttgacacccaaggcgacgcctgccgattcgtctttgcccgaagtatcgtccgatccacctccagccctaaaatcgttatacgcggcttgcatgagtagcacaaagctttgtccctcgggcgacccttcggcgcctagtcgatcccagaccaacgggtcgacggcgtccgtcaaggtcccgttatcagcgaggtgacgctggacgacggtcgagtgcacctggttggcgaacccggtgtgatcgttggagagtcccatggtggacaacctgaacgccgagtaggcgagcatggtcgatccggcagtgtctgggaaactcgattgatccgtgatatagttcctgaccaacccggaggacgtcgtcctagacttggcagccgagatgatttcccctgcccagttcccgaggttattgacctgatcctgcatgtcgtccctgaactcgctcctttggatcgtagcggcgaccctcaacatgcccgatgtggcccatccgttccccgttgcccacaacccgctgtccgagatcccgttcccgtcgcccccgacaatgtgtcgccagagcttggtatccgggtcttgcagtgcgtcgcggtagagtcggcactgatcgtaggcgatctggagcagggtctggttcgagctcgagaatccgtagtaggcgaggaagggcgggaccatgtagatgtagtcggctgcgggtgaggcgcgtaatcgatcgtcagccgagaatatccagtcaaatggggcatgatcttcagctcgatactcaccccatagttgagccgtctctgcacgatgcgagatggcacccgaggaagtctatcaaaaacgatcaatcaacgcagagtcagtcattcatttatcgaccaagctgaggccaccttgagccgacttaccctaggcacgttgtagagctgatactcgacctcttccctggccgctgtcgaataattgacacccccgatcacatcccctcccacctgctcactcgtcccggcgagcaagaccgcgatccccagactcgcagggtccgccgaactcccatcttccaacaacctgcctcctcggaaaggatcgttcaacgtcccggcgttctggttcgtcggtctgttttctagcgtgatccgggcgaggttgatgatgggttccgggacggaagattggagggagggggtcgtggtaggaggtgtgaacgaggtgttgaagggggaaaaggcgggataatcgaattcgatgatggcctgtgccagagttccattctcccaactgtcaagacgttcgaaatgaaatatcagaccgttagcaatggatccatgttgatgaagaacgagattcgactcacctcttgttgttgaggctgtacgccaacgtcctgaccttgtcaatcatctcattgctcagaacagcctcccgtttttcaaacctctccgaccgagggctcgccacgccgagtggttcggcatttaccagcggggccaggagaggcagggcggtgaggatggtggtgaagagcatgatagggcgtcaagtcttgatcgctgaggctgttcaggcggagatcaagctcgagtgatattgatcgtttgtgtgaaagtggaggcgggcttcctggtcctatacgtagctcgtcaagggctcgatgatgacgttttttgtaaactccttgatctatgttataacaagctggtggacgatcctggtcttacagtcgcagagagagagagaggacgtatagcttataggtgtacctcctgctcctgacactcatcatgactgtggacaaccttgacttgatctcaaactcgtgcgtgcgtgtgtgtgtgtgtgcgtctcatcaatcaacttttgccaagctgccgtctctccccggtccctttccctctgttccccggcctgttgcctacagaagttgctgatcatcaatcttctttccttgttctaccgatggaaacctccactatgctttcctttgatcgttgctcccgtcatcgcccccccttccccttccccctgcccttgcctgctgctggatttgtttgccaagcaagccactgacgcgcgcagccaaagacgtcgcgtcgtcgtcgatcactcttgcgatcacagtttcgcagtcagtcaccccttcgacggtttcacccgaatatactactacatcacgacagttttgcataggatgacatggatttcttctttcaaggtaccacggccacctcttctttcttctccgcctcgagcaccttaccatccgcatccttctctcgttccttgaccgtcttgacgacctctgtcggtgtcacggccgcccctccaggcgtagtcacggctgcggtctccgtcgtctccttcttctgcactacgccgccgtcgacttgaggcttcgtgacttcgacgacgtcctttgtcttttcttccacgtcgcctgccggcgtaatcgcagcagtatttttagtctatacgataaccaccgatgtcagtcgggcgaactctccgatatgctctcgtgaccacgaaaaaaggactaacctcgataagcctttcctcatctttacctcccttattgtcactctccgacggctttgtccaagcggccatcacactccaagccttctttgcccacgctttcgtcccatcccaaaccttgctgatcgtacttgtcaccgaattccacgtctccttgctcttcgtggtgatccaggtggatacggaattcaaggtcgaggcgatcgagttgtatccggattcgaaagtcgaggtgagtttaaaaaagtgggaggaagaggttgtgggggtggtcgtaggggcgatcgttgtcgcggtcatgttggtcgtcgggacgagagaagctgtacttacagctgggctagccatcttgtctacctcgtatacttctgtcacctgtgggttatagacctatgaagatgatgatttgccgtcccaattgacttgacttgatatcaatcagcattcgatcaactggggcacaagctcggcggctgatcaaacggccaactgcgtcgttcaacttcacttccgactcgtgctacagttgaggtcgagctcttataccccactgatccgaccccttcaaggagtctccttgattgacaaaggagacttcctggtcacgacgataatgaatggctcgagatcggccgaaggaaccagagtcgctagctcgcctcatgctcatcgtagaaggggcataacatatgataccaggttgtatggaagggaatcgcctgaggccgcggagcgtccgttccgagcactcaagaaatatattcgtatcgaacgtgggtcaaagtacaggttcgtatgaaaggcgtggtcatgatcggctgcaagatataccatacaatcacctgccattctggggcacacttttttgccatcgcgccgccgctagatcggatccatgtttgcgtcgaagatcttctgtttcgcctccgcggcctttctttcttcgggcgacagcttttctggcgcttcccggaattgttgctgcgcgaaggccagtaagcgttggagctttgccgctttattaatgtgttccccttcgttgtaagcttctatccgggcagccgtcgctaattcttcctccttcttctgcttttccgtctgtacccctttcgctatcaactctttgtccgtgggtttgatcatggcctttctcgatcacagactattcagtgaatgaaaacgtgagcgaggctctatttagtcactcacaaaccagccgaagacatccgtcgccttttctttgaactttccccacttcttctcgatggcggtcaagatcgaactgaccacgctgaccaaggagctggcgagactgcccagagtgctctgtttggtagaggtagtagcggcggccgtagaagcggcaggcgctcctagcacattggaagcgttagtcgtggacgtcgttagcggggtggttggagtcgcttgagggctcggagaagctggcgtggtatactgtgatccaatcgataacggggtgacgggtcgtaattggggtgtccctgaaatggtcgggttagctccaggagacggtggtggggtgtatacattcccggatgatgcaggtaatgtactagtaatcgtaggtctgagcgagggggtgcctggggcacttcccggaggcgttaccggcgaggtaagcaacatcgcttcgaggaacgtgatcagttgattggtgatcagggctcggctaccgatcaccacgatatccccaaacgtctagcgacttataaagcagattgtgcagatatcgaatcctctcctgcgaagcaacaaaggagccgaggcgagcttcgcaggagctgaaacgcttcgattcatggatattcacgtgatacatatgctcgctataagtgctaaccgctaatagtaaaatatcttgatgtcatgattgtactgtgtcgttcactcagatgacggagctgatgctcgacgatcggatactcgtatagtagaacagacgattcttcgcgcctgatatgtctggcacgatcagtccagacgttacagtgctggacctcaacgtcactcctgatataatcggtcttccacttcccttgcagtcttgcggtcagcatctgacatcccattatttatccgctcctggtcgagcttgtctcgcgcatcggccaaagaagtcttcatcttggatagtgcattgaccccatcgccaaatctatcagccaagagctcctcgccacgagcgatgccagcagcttcatccctgctgtacgtaatttttttggttctgcgcccaagctttcgtacaagacacaatttagtgttacaggacactaatgccgcatgaaacggtccaggtcgcttactatcgccttgcccaagtctctgaagggttgaaatagtgcatgcgcgaactcacgcgcgatagtactcaacgagctttgcgagctggctctagtgctgatagtcgtcgaagaggcggtcggtccgaggctctgagagtagttggtccccttactcaatgttcgggccatgctgtccgacggtagcgtcggcccatatgacatttcgaggactggcagtagcgaaaggaagtcgggatggatctgactcttttggctttacggcttgtagaagtaccctcattaacgtcttaagtcttgtgtcggttatccttgccccttctgctgtttcagaagccttacgatgaataacaaagggtaaatcactcggaggtctgaaacggaaccgacctgatatgcatccggtttgagctaagctctttcgttggccacggaagctattccgactttcgggtcaacccgatccacctcattcactcgccagcgacatgcagcatgcagctcatcaattgcatgattgagcgacaggtgatgctatagccggtcctttactgcttgtggtccctaatcccatgttgaaattcgtctctcgtacaagcttcaaatctattccttccttcccgcgcaacaaaacctccctcacgcaaaccacttccagccaaatccgcaaaatgtctgccgctccttacaccgttgtttccactgacagtaggtaacgtccgtgaacggtcgttggcagcagaagtctctaaatatcgatgcatcatcacagaggcccctcgagccatcggaccctacgtccaggtaggtctccgagactgtagtgacatcggtatatcataactcaacacctcatcccattcatcgagaacaggccgtgaagcacaatggcgtaagtggcatgatatcttctgcaaccggtgaagcaaatattgatttctagctatgttgtggtcctgcagttgatctacgcttccggttccgtccctttcatccccgagaccatggagatcatcgagggaggaatcgaagcccaggcagtgagtctagtcgaaaacgacattaccgatatgtcaagctcattcccgggtcaccgcgatcgctaaacaggaacaaatgttcaagaacgtcaaggctgtcatggacggtgccaacaccgatgagagtcacgttttgaagaccaccgcaagtcccctcttctcgcttctctcacccgtgaattcccaatccccataagctgaacctttcgatcatgttattcgctcacaggtcttcttgaaggacatgggcgactttgcgaaattcaacgccatctacgaaaaattctacgctccttacaagcccgcgaggagctgtgtcgaggtcgccaggctccccaaggacgtcctttgcgagctcgagttcatcgccgtcgagaagaagtgaaggttactgaaaaacacgacagcacggttgtgaaatgaggaagctagcttgacatgcgtgaggaagactagggaagatttgctgttcaatatggcaagcaatatatgaaattagtcagcccgccgatcgacatgacgcgtttgctccggttgcccgatccctttcatctctcccatccgcgtttcagacccttcacatagagtccttcgtatcatcgttcatccctatgtcctgttcgatagcccgagatacattatacgatctgacaggatgcttgctttttgttgcgaaccgcgtcttctccactacattcggtttatcggcagaaaccgttgctatccattgataccatgtcgacccgggccgttgatcccaccgagacagccgtcagtctacaggactcttacaaagatgtcaccgagtggtatgcctcaagaaccaccgtcaacgatgcgtccagtttccgagtgctcgccgtgtcgctcctggtcctggtaagcaacaaccatcatgtcgatcctgcatattggcgcacatgccgatcctcgacgacagccttgggtcttcttggggttcttcgcctttatcaagttcaatccgaacgtgagcgcctccgcacccgcttgaatctcaagccgtactggatctgctgaaccggacctcgcatgtctcgcacaaaagacatttctaactccgaggatcaggatacccaagaagtggcacataggtaccgacaagtttgatcataatggatggttaagaaattacctagtgggttcagagcttgattggcttacgcatggcatcccctaccatgataaaccttggagtaagctctgaaacgaaatcgcggtgcgcgaacaatactgatatagcactcgcacaggtttcgaccatgtcgttgtccttcggttcactcgtgtttgctttcacctgatgtgcatcatcgccgtcttggccgggacgactctgattccgacgtacaatacgaacactgtctcggtcgatacgtccttctggaatcagacttatgccgatgctaccggcaccaacacggtcacatcagccatcgataaggcgcaatcgctcctctacttcgaccaactgaacgcaaaaatcaccaatgtggacgaagagctactctggtacccggtagctgtttgtgcagctatcagcctgatagttcaagctgcattgatataccataccagaagtgtgagtctcgagaaggtctataatgtgactgatggtgacttgacgctatcaacaacttcgacagttaacgaagttgaaatgtcaatggctggccagtcgcaatgacatttacttgaggacattgatcgtgagtgttcccattgaccgtctggtcaaaagagctcactcagtcgatacagatgcaccgcctggagaactatggtaggaaattgtcagacgaatcgtttcacgagcgaattcggctctcttttcaagcgatgggtctgcccgcccctgacatcgctcaatccttcaagctaagggaaccgttcgccaacggcgtccttgggacctctatcaggaagctctgctgctgtggcgccagcgatccggacgaaacgtctcacttggtagccggcggtggcaagcggaaagctctataccacctgaccgtccgcatcaacaagataacaacaaggatggaaaagaccatttcaggttactacttgaaaagagaagagcttgcacctgtcaagggcaaaatgctagtgagctggagaaatagatcgcaaaccagctgatcaccaattaacttgatgaaacatacaccccagtcgactagcaaatcatatgccgacggtcctgtgattcgagcctgcgtcaagtccctggtgtgagtgctacaagcgtatcaatctcacaggtcatgtcctcaaagttcattgaggtctgctatagctctgacaagaagggaaagaatggccttttgcaagccctagcaaaatcagtgaggacgacacagacgtacagagtcttgaagttgcggtgtatctccctgcgcgataactggtcagttttcggtcttgggaacgcaatgaccgtgctgaaacttgatcgaatgtcctcagccacaagatgcgcatcaatcaattgcatgccgcaattggagccctctataggtacgctggttaattcacctgcgatgctgtctgcgactcactccgcctgacatcagcgtggttgaaaaagactcgcataatccagagaagatcaagagcaagtgggacttgctatggctctcgtaagccaattgtatcgccgcgactttcgaactatcacattaacaattttgcgcaaaaggacgtttgtagccaaacaggagaacaacgaacttcgttccgcctttacgaaattcagcgatcttctgtaagcgtaaagtccaccatgtctcaggatagccaaaaagcgcttatgttgctggtcgcaacctcggactatcagaatcaaacatcgccaattgagacgacagtatgcccttcgacgcaagcaaaagtcgaccgctaaagaggaaccagatggatacagtaaggccaaacagcttcacttgatcagaattaaagcttcctgactctgaattgcgttcaaagtctcctgtatcctacctactgtacaaacagcatatggggctttgagggctttcaagcgtcaaggacatttcaggctcctgaaggggaaagatcctgattcgggctacaccaagatctcgacgagtggccacattgtctgtgctggacccgtcagagtgcgtatatcggctgagatactaatcagaacgattgtagaattacttgtgctcatccttttgatcccccttaggacatggtgagcgcttgtctatatctttcggtaacgtgcagctattctaaagggtcgacaacaggaatgggaaagcctaggagactcaaaatctcagacattcaagcgcaagacactcttcatctttagtttctttgcgatttcactcgtagcgaccggtccggccaccttattggcaagttctagtccgccactagctagcagaaacttctagctgacaggtcctggacatagattgcgggcactgccaaattcgcatatgtgcgtggaatacatgacatagctgagatcgcgtgctgattcatgcacgctcttagatcggcaggatttccccctggatggcaggatgggtcgaccggcaccctcaggccgtagctacgctatcttgtcagtgtcgtaaaccgatcgtccagtgcatatcaccttgaagtattgactccgcatttgaaggaagtgatgcttccaatcctgttgatggccttgctcaacggtatcgtggtacctttgatggtggaggagttggcgatattcaaaggagaggtgagctgacgaacgcataagaacttgctgaccgttcggtgctcgccgatttgggaatcgatagatcagtcactcgagcatgaacagatctctcatacgttatctttacttctttcagatgctgcaacaattcatcctgttcatcattttcggatctgttgtcggtacgcgcatctccatcgtgcgcaatcaagccgacgctgatttcgggcgaaactcagctgtgataaccaattttattcaactctggcgcactggtcagtatgatcagatgcttccaagtcttttgggtaagaaccgatctcgtgaagcgcttcaaattggcgcaatgctctcagcccattcggtcctcctttacagaaaccatgaagcactctcctcgcgagattaccaattcatcaacatattggttagcatggctcgcgatgcagagcgattttgcattcttcgggtttctcttcggtaagcagcgtgtgtgtatgctggtgaccgatgtctcattgctccgccctacgacaggatacaaggagcgattcttccgttggtggtatgactatcgtaccaaagtgccggtaccgcgagacgacttcaccctgcaactcgccgagccgttcgatctgggctatcgaatgtccaatgtcgtgagcgtctgcgtgaatgctgtgtgactggcaggggacttatccgcgtcgagagctcttctagatctttcaaacaacagtggcattgatcatggtgcctatcgcccctctatgtgccgtcatagcaactatcatgcttttttgggtcaacgggtcatacaaattccaaatgtgggtagggtagatcttcgagaatcgatgtacggtcgagcgtttttctgatccttctgcagtctgattatttgtgaggacgactgggaaggtcgcggtgctgtttggggcacattatgctcgatgttacaggtgggcttaggaataatgcacgtaatgcttgccgggggtgagtcgttctgagcgctggtttagtccacaaccgcatggtaagctgagattggtgacctctgcctagtcttggcataccatggtgactcgtggaccttgcccatcggagctctgggtcccaccgcactgctactgttgacaaacaagacggtcctcaagatagaattaaaccgtttcgaaacgtgccagcaggtttcgcgaacgagtatgaaatggggatccaaaacgcatgttgaggatgccaagggtgtcgaagggaaattcagccaattggccatacagaccgcgtgtgcctccctgttgcaagctcagcaagaaagaaatgggcagatggagaagctcttggcaaagaccggccagaacggccgatcagaactgaagcgacgcctacagggcatcacgctaggacatggagcgaggttgggaaaggggataataaaaaagtcaatgcagaaagcggagaagctggtcaaggagaaatcgcagcaagattatttcggacaccctgcgttgaacccctcgctcggcgatcctttttatcgtcttttactgagcgatcagcagatcgcagctctactccaattcatctttgaagtcaggtggaaagcggcctgtggcgataagaaggcaattactgctggatactggtgcttgacaggaatcttgcgggtcgtcgaggaaggcctgataaagcgaccggtaggcaagttgacaatgcgctcgatggtcgtgcaattggccgacagcttcctcgaggttagtgtttggtacgagccatccaaacgactaaagtttactgaccccttacaacagctctgggcgaaggatcggaagaaactggaggcatttatcaaagcaaagctgcagccgcgtgaggcagacaagtactctgtgaagggcacttaatggttgtatattgtcttctgcggtcatgaacgatctgagcaaaggtttgatagacgatagatacctagttgctcttggtaggcgaaccaatcgcttccaccgcttgacttatccagcgggcccaggactgacgcaactctcgatcgtagacagactctgctgctttcacactgggttgatctcacattgcgtcaacgtcggacttctcctgccgtacgatgatcttctattcgctcacctttgaccatctttgaggtacactgcacaatccggcgactcgctcatcgtggcatctccgaagcatgcttcaaacagctttttgcctccctcttccggcgtgcttgcaaacggggcgtagtgcaatagatattgcatgaacatctgggccaactttggagaattttgtgagagattggtcgatggtacaaaacctgtccggttagttgacgagttgtaaacgtcagccttgtgtccagcattcgagagtcgaggtttcaagtaattgacctgggctgacagcgacgctttccacttcgcactcgttcagggtctccttaagcgcgtaggcataatgcgtctgtatcaacttggtgaccttataggctcgcattccatcccaggattccgcgcctagcagatcgggaagtgtttggggagaaactatcgagattgagagagacatcagacttgtatcccgttgactattgacagcgactgcacgtaccgatctcctgaacccttctatgtagctcactagagaccgttaccacccgggtcgagcgatcggatcctcgttgatggaatgcaggccgaagcttctcggtcaacagcgcgtgacctaggacattcgtcatcaaagactcttccacgggctctccgcgtagctggactggagtcgtcttgcgagctctaggtgcaaccgcagcgttaagaaggagatagtctagctgcttctccttctccaggaacgatttggcgcaagcttggatagaagatggtgacgacaaatcgagcggcaggtggaacatccggattcgatcgagaatatcgtcgttgctgatcgagccatcctcggtagacggtgaggacgacagccatccggaatcgggcgttgagtgacgcaggacgaagagttccagttctcttgtcggtggtggtcttcttgtgcagacgtagacattgatcggtagatgagaattggcggtcgaagttccgctagatcgagagttccgtattaattggatgagaaattgctgaccctatgataaggagatagatgaggaatgttccagctgttgtatgcttgtgcatgaaagagaatctaggtagcgcagtctgagcttacgagattcttagttgctacatcgaaaggaaggtggcatgagtatgtaaggaggaatagcagtttccagactgcgatcaatcacacggtcggctccaccagtcaccccccgtcaacagtaaattctgtgccatttctagggtcaattgatgtggattacgactgcggcatgctaggtcttgaggccaagcggggtcgagttattccttgcagctcagcgggaagcatagtcacagttgccaagggatcccgaggtgagtccagcgatcaccgcctcgatagttacccgcgtcagcggagaaagacgatcgaaggcgtgaaggtctgcattttgcgactactgttatgtaaattcaaaacagcaaacatcggagcccctagagctccgttggtagagcagacgacttttaagacattcatgtcatcgtcaggtcccgggttcgagccccggtgggggcttaaaattttgctctttttgcggtttttaaacgcgtgctatcctctcggcgaacttcgcgcttcatttcgctcgcgatgcgccaactccccagtggcatcgtagcagtcccgaccatcgggtatgtttatcgggcaggcacaccttacatcgctgaggtggcggtagcgcaatacacctcgaaaaattgctattcaagtcggatagcgctgcatgtgctactgtactatacaaggcgtgttgtgcgcgcaccgcaggcgcatgagatgggcagtacagctttgtcgagtagtaccggcactatttgcgagacatgtcgaattcagatctcagaggtaggggatatccaagaagaaatcctgtctggaattgctgagaattctgtaagtatcaatgtatcactgccctcatatatcacgagttgaagaccgcagacccaacacatcaaacccaaggaaaggctatcctctctagctgtaggtttaacttgcgattcataacagaatagaaagaacactggctgaacagtgtggtcctcgttcacgatatttcatcgacagtttgtgattcattacgatctcgaaaatggatgatgtcggcttcaaagtcctcctcgcacccagaggcgcgatacttctcgtacaactcaaacctcctcatttcttcttcgtgcttcagctttgtcgctctctcggctctcgcgatctcccaatcttccttctccaatttgaaacgctgctcgtctagttctattcgtctttcttccgcctgcatctgtgcagctttgtgagctctatccgcctccatcgtcctcgcctctgtcgccacgctttgtccgaaaacctttgcaatctgattcaaggcatcatccgccatatccgccgccatcttcgccagcggtcaattgcctcgaatacagtcaaaagttctgggcttctgattctcgctgtggcaatgtcgatcatcaagatatgcctatgcaatctagatagctgtagctcgtccctaggtcgcaggtcccaacactcgctacagcgcctatatcctagttgttcaggactggaccatctacctatcatgtaagcgaacggaggtcttcgatccctctacgcaatcttttcaaaaagatttgcgagaaccgatttttctgcgcgaactagctgatagaaactctcatagcacggaagcgcaacaataatgtttcccaaactgccagtctctattgggctgtcattggccttgcctacattgctgtacaataatgcatatgctgaatagactacttggcgccaaatataatgaccgagtctacaacatgggccgattcgctgtaacccagaactgaagcgatgtccacgctattggagagcgagtcatgagtaccacattcaagaactcgctggcgggaagcagctactcacctcttgactcccctcaaacgatcaatttcgaccgagttatacaatgccagcccctttcctatggccacttcttcccaagcttccgattcatcgtcgtcgaggtgtcggaatgctgctgttgagtcgccatgggtctcggccgcaccgccatgggtcttttccgccatgacgtgtttcacaagcgtcgcaggactctgcggtacgctggatcttccgttcgagctcaaggcgtctaagctggcgatagacgatgagagcgaaaggaccgggtagaggttcggtgtaccaggcgctgtaaagtgattgttcgaatttggcgagtccagacgactgcctgcgttgtcgtaagatactggcgtagtggctccagagattccggccctttcccgactctttgccgtaccgcgtgattccggcgatatcgttctttcatgcactcgtcgtctaacaaccaaggtcacggcctgatgcgatgcgaacgttcccaccacgcgaacaactccagcgggcagtaatcgactgcccgactctttccgttgaatggctcgatacgctccctcgtcgatactaatgtatgaagttgacttagtacgggtcgaactatttctttgcgtcgcgaacgacttacatcactgagccggccgcgtgtaggccatgagcgatccaccattttcggctacgttgacaacctcatcaacgtgaatcctttctgaccgaccacacgcttcatggaggactcactcgttcatccttctgtctttccccaagaatctcgtacagatcggaaccagatcgtcttccttctcgtcatcatatcgcaggatgtccgggatggtcttgatattagccgatgacatcacaatggtcgtcactcctgcagccgtagccaggtcggccgcgatgagcttggtttccattcctcctgtacctagtgcagtgcctagagacgctgttgacactgcagaggacgaaaacagacgggagagggatgacaggagttgggttgagacacgacaatgagaccacgatcagccacgggccttaaagagcgctcatgtccagctcaccttgctgccgaatcttaaacacgtcatctaccactcgcaccggtcttgcgtcggggttcttcctcggattatccgtatacctgccccgaccgagccgtcagccgcttgttcatgccaagtttaggtcaaagaactcacaagcaatccacatccgtcaacaaaaacagatagtcggcgtgtaccatgttcgcggtgatcgcgctcaatgtatcgttatcgccaaacttgatctctgagacggaaacggtgtcgttttcgttgacgatgggaatgacgcccatggagagtagctcggtgaacgtgttttgggcattgaggtatcgttgtcgctacatgtcgaacagcgtgtcgaaaccatcagacattgctctgataactcacgaaccgctagattcactcacgtcactgatgtcctgcctcgtcaatagaatctgtgcgattgggattccgaccataccgaacaagttgtcccacatggcgatcaatcgtccttgaccgatagccgcaagagcttgcttccgctggagaccttttcctcggtccttcagctccatccgtcggagacccactccgatagcaccagaagatacgagtactactcggtggttgtgagggggcgattgcaatgcattgatgagctcgatcaaggaggagaggagcgaaagttgaggggtgtaagggaaagtcgaggtgatgatcgatgtcgtgcctggagatagatgcaggcggccgatttagcttgaggagcgagtcaagttcatcaaaatgatcttaccgagcttgatgacgattgtctttccctgaatgtccagcaaggtcatgaaccgagtctcatcgcgttattaacaacacctcgcacgacctctgtttcgcgcgtcttaccatgatgtctttagagctctaccggcggtgtcctcctcgttcgcgacggcttctttccagggatgctagaaacgcaagatttctatgctccacaagaggcgaatgccaggcggtgttggtaatcacggttggtggaatggctctagaccttgacatgactcggtccgaccctgatctttcggatatgatgtaccttgacctggctacgcatctcgatcacgtgatctacttggatcggaacctaaatgacgatctcgttgcaactgagatatcgctttcgccaaactagctgctagctgatcccagccgtccgaggctttaatagttcaatgacgatcagggccgctctccgcaggtggctgggactcggctcactacaaaatgactacaacaccagaaagacggcgaacgtccgcgttctgtgcatctccgattacagaatcaggaagggcaaggagccgtggttgagagctattactactttattattcgaaagcagcgattgtgatgtagtctttgcgcatgttctggatgagaggcagcgaatcgtgatcaaggattttggcagtcatatcgagcttgtgctgagacagattgctgtgcagtgagcccagtgagaactggaaccgcaactctactatatcatcgccgttacatctcctcatgatcctcggaagctgccttttggatatcacctttgatgctcgctgatcctgtggactgaaaaggttcgcacagtagcgctgcgttgttgacatcaaaatcggcaggtagcggagtagatcgacaccctcgacatcgtcaaagaagaaggagcccagctctccaaccatcctcgacgggttttcggttcggatcacgtcgatcttgatcggcattcgaaacattccctccactagccttcacctgctttcgaacgatccagcgaaatcgtcatcgcaacggtcatccgctcatgcctccacctggattaatacgagtcatacatcgctcaaatcgtgggccgccgccgggtccggcgcgaccggacgtccctccgaaccccggttccgtttcgtatcaagtcatccctcgtcgacactgctcttattccgcctcggaggccgagacgcaaaggttcgcagatgactggttcggggtcgaaaccccgggaaggtagggccatgaccgatcatgatttgggctttgtcagacctgtagtatggttctaacgcacgaactagctatggtccgatgttagtgctgatacgtatttggggattttgcgatagggtggcctagggtggacgggtcgggaatcacccgctcttggcctcgtgcccgaagatcgggttttaccccggatctcggttgggacgcgagtcaaagcgagttgcaagcgaaggtcgcggacagaacgaaggcgttgttgttgccaagggggtccttcttgactcggtggccggttccgtgacatgtttcaacttgaacaacaacagtcagataaataacgatgcggaccgagattgagagcacctgggtagatatcgggatgtactttgacttgtgtgcggcatatcttccgcaaagtctctgcaagtctactgaacgtcagctggtcctccatcatcgtcatcgaaagaaggcgtctctgtgaagcgttcatcgccctcttcgcccgccgttgtcatttcacgtcatactcgctgactgcgagctactcgaggcgcgccgcccgaaagagaagagtgggccggaggccgcgtgatcctcacggctgatcagcgggaaaacggtgggttgttttgattttagcgctaagcgagcaaggggcagaaggcaggaaagacagagaaaggaaactcaagttccggccggtcggcggcttgattgattgatcacctactcccaaactcactaaccagctactggctactggccactggccactggcttcctggcttcctggctctctcgctcgatcgcgttttctgggctttttctcggttttgactgattggtaagttggatcatccccccacaatcgtaccaggttcataagtgtttatcgtcaggtcctatatcatcctactttacaacctcgtacgatttgggtccagtccatcgttcgatcctttgtcgacgagtcttcttgtcgctcgagctcactcgataaaactcaccgacgactctcccgcttctatacaaaggcaaaaccacgggatcaacatcaacagcccgttttgccttgaccgccttttgctcggtgacgtcgacgctccccgactagattaaaatcacaagagtaggctctcatcgccaagcaggaccctcgctgtatacatacgacaggctacaaatcctgtctttgtgatctctcgatcgttgcctcacacacgaacgagacaattgacgcaggatcgactgaaaaccatgtcgcacgtcaacatggccaacgaggtcgttgccttgggcaaccccttgcccgtccacctcggtcaagaacacaacaacaacaacaacagcttttcccaagctcctaccctcgccccttcttcatcttcccgatcgtcggccgaggagaaaccccacggactcgtcaagcctagcacgacctcgtcctccagtgggtacgctaccagccacgaccccgaaaaggctggccacaatggcttcgccggggatgatcacgagaacatcgatgaccaccacgtcgatgtggccaaggccaaggaagagtttcacgctctgcagcgacgaatgtctgagaggtcttctctgcaccgagctcggactcgagggagttccgcaccgggcgacgtcgagaagcaggaggccgatgacgaggagtggaacttgatggactacatgaagggaaaccaggaaattagggagcgagaaggattcaggcacaaggaagtcggtgtcgtctgggaccaccttagggtcattggtggaggtggtatgagtaagtcactgcagtgtcgacttgccatattgctggtattcgcactttaaggctaagcatactgggatcgcttcatctcgacaaacagagatccacatccgaactttccccaatgctgtcgtggagcagttcgtcatgcccgtgatcaagctcctcaaagttttcgggatcgaccccatgtcgcccaaaccccgtgacctcttgaccgacttttccggtctcctccgtccgggtgagatgtgtctcgtccttgccaggccaggtggcggtgccagtacctttttgaaagccattacgaacaaccgtgagagctacttgaaggtcgagggtgatgtcacctaccagggcttgagtgccaaggagatgaagaagaaatacgctggagaagtcttgtacagtgaagaaggtgagcgctaccgggacaatcgatagatacatgagcggtactcacctgcgattttcctttgctgtgatgcaacagacgatgagcacttgcccaccttgactgtcaagcagaccatcgagaccgccctccgatgcaagacccctggcaagcttcccagcggtatttctgagcaagagttccgtgaagaattcctccgcaccttgctcaagatgctcaacattgagcacacttccgacacccttgtcggtaaccagtttattcgaggtgtctctggtggagagaggaagcgtgtctcgatcgccgaggctttctgtggtcaaggttgtgtcttttcctgggacaactccacgcgtggtctcgacgcctctaccgcgctcgactatgccaaaagtatcaggaccttgaccgacatctcgtgagtgatctgctgaagcatgacagatcgactgcacaacgaattgacccctcccttcgcacacctcgatagcaaaatgacgtcgttcgtctccttgtaccaggctggtgaaggtatttacgagcagttcgacaaggtcctcttgatcgacaagggtcagcagatctactttggacctgccaaccgtgctcgtgaatacatgctcagtctcggatggaaggacaagcctcgtcagacaacggccgatttcttgaccggttgtaccgacgagaacgagcggtgcgtttacaagaatgcagactgacatacgatcgacgtgtaactgatagaggcttgacatccatatagtgaatacgcagatggttacagccctgacaacacccccaacacccctgaggagcttgccaaggcgtacctcgagagctcaatgttccgtgagatgcaagccgaggcgcaggcttacaagcaggagatggaacaggataactcgaagcaggaagagttcaggaacgccgtatccgaatccaagaggaaatttgtcggcaagaagtcaccctacaccgtctccttctttacccaggtccgagccctagtccagcgtcagcttattctcaacgttcaagacaagctgtctctgtactctggtttcttcactgcgtgagttgtacatgcgtgtgggctaggcgctggctatagactgatccgctctcgtctttccagcatcgccatcgcttttattgccggaagttgtttctacaacttgccccagactgcctcgggtgccttcactcgtggaggtgttcttttcatcgccatgttgttcaactcgttgcaagccttcagtgaactgcccggacaaatgcaaggaaggcctatcctgtactcgcaagccgcaaagaagttttaccgacccggagccctcagtgtcgcccagaccattgctgattgtgagtcggtatcggtctgatcccaatgtgaagtttttgtgttgagcgccttctctgttcagtcccattgaacgccctgaagattcttatgttcaccatcatcatctatttcctggctggtctcgctcgaaccgctggtgccttcttcaccaactacctattcgtcctagtcacttacatggtcatgtcggcgttcttccgagttttgggaaccgctacccgggactacaatgttgccgcgcgtttggcttcattgttgatctcgttcatggtcatttacgccggatacatgattccaggttagagcgaatggttcactgacgatcgggaaaacgcttactcacgtaaacgatactgtcttccctccccttttgcagtcttcaccatgaagcgatggctgttctggatctactaccttagtgagtaatggcccgatatttcagagttgcaggcgcgttacattatcctgacattgatccgatatttcagaccctctgtcatatggtttcgagtccctgtaggtcatacataacatctgctcagctgtaatttacgcgccgtacttataccactttcgctctcaggatggttaacgagttcaagagggtcgatttgcaatgcgatggcgcatacattgttccctacggacccggcttccctgctactgtcgccaacactcagcaggtttgcactcttggtggagccactgcgggtcagaattcagtttccggtatggactacgtttcgactagtttcgactacgctcgtggacatctttggcgaaaccttggaatcctcatcggattcttcatcttctttgcggttctgcaaatcatcgcgatggaggtccttgctatgaaagctgccaacgtccaggctattgtcgtgtttgccaaagagaacaaggatactaaggctcggaacgccaggttgcaagaacgaaagaaggctttccaggctggagagatcaagcaagacttggctggtttgatcgagtcgaagcgggccttgacctggaccggattggtgagtcttgactgtcgcggtcgttctcaaacgccccgatattgatgcttttgttggccacagaactacactgtcaaggtgcctggcggagagcgacagttgttgaacgaagtggacggttattgcaagcccggtcaactcactgcacttatgggtgctagtggagccggaaagaccactttgctcgacgtattggcttctcgaaagaccctcggtgtcattggcggcgatgtcaagatcggtggaaaggaaaaggacgtttcgttccagaagggtaccgcttacgtcgaacagggagatgtccatgtgagtgctgtgccggtcagcgtagccgtactgagcttacctgtagcctttgttctcggcctcataggaatggactaccaccgtgcgagaggccatgcgatacagtgcctaccttcgtcaacccgcttcggtttcgaaagaagagaaagacgactacgtcgaggaaatccttgagctcctcgagctgcaggatctcgccgatgcgatgatcggtttccccggattcggtctctctgtcgagagcaggaagcgtctcaccatcggagtagagttggcctccaagccccagctcttgcttttcttggacgagcctactaccggtctcgatggtcagagtgcttacaacatcgttcggtgagtcgaccgggtcgctgcatgccacagggtgccgatagctaaaaccacccgccttcactcagattcttgcgaaaactttccgctgctggtcaggtaagaatcgtgtacgaacgagttagccatcgggagccagtctaaccatttgtcacggcttcttccaggccattctctgcaccatccaccaaccgaacgctgtcctctttgagaacttcgaccgcctgctcttgctccaaaaaggaggtcgatgtgtatatcatggacccattggcaaaggcagtgccgacttgctcgcttacctcgagaagggcggagctagaatcgaggagaaggagaaccccgccgaaggtatgccgccctgtttaatcaattccagtccctgactctgctaaacaaacaacatcgtgttcccttcctctagccatgcttgacgtcattggggcagtaagttatctcgaagctcagcaattcgctcttccttggcacatcactgacacataatatctctgcagggttcccgaaagcgagtcggtaacgaggactgggcagacaagtggaaccgctccgaggaacgagccactgtcctcaaagagatcgagcagctcaacgccgaggccatcgcccgtaacgaggagattcctgaacacctccgaaaggaatactcgacttccttcatgttccagctcaaggtgagttaaatctcgtttgattccgagtcatttgcttccgaaccacgattgactcattacatcgcgatgaacagactatcttgcaccgaaccaatgtcgccctctggcgtaacgctgactaccagtacacccgcctcttctcgcacgtcatcatcgctttggtcaccggtcttactttcctccaactcggcaacgaggcgcgagaattgcagtaccgagtcttcgccatcttcatcgtcactgttcttcctgccctcgtcatcgcccagatcgagcctcaatttatcatgtcgcgaatgacttactaccgagaagcgtcatccaagatgtacagctcgcaggtatttgccatctcccagattctcgccgaactgccctacaggtgagtcgcgtttcgtgccgttactgccgatcgcatcactcaagcctcttcgcactactccaatagtgtactgtgcgctgttggtttcttcttgccttggtatttcatgattttcaaggttcgtgaattcgacatcgctgcgtacacacgaaagctcataagacgggcaacgcagggccaatacgaggctcctcgtgcgggtgttcaattcgtactggttcttatcacggaagtattcagtgtcacccttggacaagccgtcgccgccctgagcccctcgatctttgtcgctgcgctgttcaaccccttccttttggtcatcttctcacttttctgcggtaagtagatgaaaatagctctaaaaggtgtaggtcgtccactgaaaattgagtattgccctgccgcaggtgttaccattccgcaacccaacctcaacgttttctggaagtattggttatactatgtatgtgtgcactcttacaaggaaccgcaggccgaatcgcacgcttactcgttctcggtctaccagctcaaccctttcacttggttggtcagcggcatgacggccactgctttgcacgaccttcccgtcgtctgcgtgcgtagaccatctcttccttcttgctcagatatccaactgacaagctgtctttccccgataggccgatgacgagtacttcagctttactacgcccgctggtcagacctgcgccgaatacgctgggcaatttgctcaaactatgggtgcctacatcaacaatcctcaagcgactggagaatgtcaatactgccagtacgctagcggtaacacattcctgtctgccatcaacgtcaagtacagcgaccggggacgcaacatcggtatctactgcgcgtaccttgtgacaaacgtaatgattattctactcgccagtcgcttcttgaagtagtaagtcggaccgaggtcaccgcctgaggaacgatactcattccctcttttcacctcgcagcaccaagcgatgaagaaaggctcgtctgaataatcttagaccttgcctacttgtcatttccgtttcagacccgttacgatataattcatatagatgtagattccttacgatttggttctccggggtgctgcatttcatctgtctcccatgggtctcacgtcgtcgccatccctctcgtactctggtacccaagcccttgtgtcgtgcccaaatattccttgcccttcgacaatgagcacgtaaacacgtcgaaggtgcgcattgagggtgcgacgtacatcgggttcgctcagagcttgctagttctggatagtgtatcagaaggcggctgaaccgcccaggagctcctgcaaggtcgcgaatgagtcgcacgatcgggccgggactattgccgtaggatttgatgcggatgtcggctcagaggtcgtggtgaaaccagcagcaacacggcaggcgaaatatgctttgcactgagcgatggctatcaccggtttgcaaagatatcactacaatgccgtttcgtggacacactgtgaggaccgcttccgggggaagcgttcgaactgtgtcaagagcgtcctagcgcaagccgtattgtgcttgccggccggacgatgtagcgcatcaaacgactctcaccaggccttcgttctcgttactggatccgaggtggtcgaacatttacgcagggatttggcaatatctagatcatagtgactgtttcgtgcggaaccgtggcaactctagctacctttgcccttatcgtctccctacccattgagaagcacgtcccccctcccccttggctgcaacgtagctatacgaagctcttatggacgaccaccgcatccacgtactcttcctccccattctcccccgtgatcagcctgccggcaccggggatgagtccgacgcggttgaacccgagcttgtcccaaatcgccagagaggccttgttggctgtgcggtcgggatggggatgtacgacgagacgagaggagcaaagaggaggggatggtatatgatcgtcagtcggacatcttcggtgcctccgtggtggggggggggagtagctgacacgttgaccgcgttacatctcgcttgatccctgattgctggtcattctgattaggtttcatcaatcagcgcgcaggtcggcaaagagtcttttggatcgttcaaaggccgggaagacagcgagagatcgagggaccggcccggactccgtaccagccaagcgatccaggtttccttttcccatcaaaacttcgcgattggctgtcgagctggccgtcgaacagatgactgaaacgctattagtttatcatttatcattattgcatctgatcatttccctatatgacccgctcgatgataaaagcgcgcgcctgcgtttcgtcacttgttacggcaacgatatgccggcatcgggccgaggggagcatatccagaatcccgtttagggaagatcaatgagcagttcagtaactgaatgtcaccatatcgtcaatccgcgctatccgactcataaacaggtccacaacgcaaagaccatatcggagtctgcctggcaccatgcaacctcccgcaaatcgatcatagcacgctcagatcgagctcgatttttgcatattttgttcttgacaagactcaagagaggatattcggtcggggttccaattagcggcacaaaggaatgtcgcacggatccgtgagtcacgacactgggggatcgttgttatgcaatcgtcaagaccgacggggctctctttctgacaccctgcgacttccataaatccactagtctcgggacgatcctcgacccggtcccaatacgccgggtatcactccatgggcagcgcggcgaaaccaagctgctcctcctcctcaccaccgtaatcctcgtggccaccatcggggctctcatcttccctcttaccacaatcacaatcacaacaacagtcatcagcaacagcaacatcatccagccccatacgcttcaaacgctcctgatccagcgccgtatgtcgcagccggtgcgaatacgatccctctgggcggctcggcccatcccccaacgcccgttgcgccagtgaagaaacccattcacacgccatcttatcgaggtggagcgtcgagaggcgggggttttggttcgagaggacagcctaattggcaagatcgggaaagggatacacgggagcgagatcgggagcgagaacgagagcgagaacgggcaagagaatgggagaggccgagggaggtggatccgagagatgggccggccggatatagggcaggttatggagatcgggatcgggaacgggacagagaatgggagagggataaagaatgggaaagggacagggagagggacagagattatcgagaggatcgaccggggccattccaaacgcatccgaacgctcttccttcttcctcttcaaattctgctcttccgtcccgacctgctggagcctcaatctcaaggcctgccggaccaggcaatggaagcggagccgctgggccaataccgacaggcccaaggatcaacgcctatcccgctgatgcaaggactgtcagtagaggatctcggtctcctaacgggatggacctcagagatcgcgacagagactggcacagaactggaggcctggatagagacaggagggagaggagccgggaaagaggtccgattctcgccaagggggcacatgtcggtgcaggaaggtgtgttatcttggttcattgcgcggttgcccggggttccggcagttaaccgtttgttatcgatgcagaggcacgtatggcgataccgctcgtgactttacgaccccctcggcggttgcatcatcatctacccgtccggctgtgcacaactccgtacctacgactccaaattccgtgagctactatcgttcctacggcgcacccttgacggccaagccctttgcaacgccgtccgctgccacttcgtcctcatacgccaatcatacaccgctcggaggaggagccgcatcgattcctaccgagcctcgtagtcaacgcgctagaatgccggagagggcagggtacggtggtcctaagagtaattggagcagcgggacaaacgaccgtgagcgagtcgctgcgggaaactcccatttggacagagacgatcgggctcgaggcagagatcgatcggagaggggatctgcaacaattaccaactatgggtcgaggcagtcggatcgtgcttccattcgatcggggcgctcgcgtgattcatcgcggtcaagagcgaggacgagatcactcagtgcaccacactacgggtcgtcggttgggggaagtgtgactggagggggcggtccagctcaagtgtaccggtcaggccaacctccgagcggaccaagggctatggtggatcccattgcgagtccgtcgaccgagatggatcagcgagttcgaacaggatacggaccgagtcaaggtctagtcaatagcttgacgaccccaagggcctcttcaccaccgcaccgatccgcatctttcgttcccatttcaacgggttcttcgagccaccgacgtcaagacactcaaagcgctgacggaatctcaacatcaggaacagggggattgggtgtcggcaattgggccaagaggagggaaatggatcgcttggtaaatgagatgagacagggaaagcgtggagcagccgtttcgaattcagggagagcggtcccttccggatctcacgcttcacatagtgatgaagatagggatgaagtgattggtcgatactcaagatcagggcgatcgagagagccgtcccgagccagatccaggtctctgtctccgacccaggccgaagcgcgtaacggacggattgagcggcgtcgtagtgcgtctacccgaggttattcagaccggggtcagcgaacagacgacgaatctcgcagaggcccagtccgaccttcgtcctttgagccagaggtcacaggaacgcaaatttcgaagagccctgtcaagttgggcggtagtagggatcacgcgcgcataccgagtcctatcaagcctgggcatgcgcttgcctcagccaaggttcaagtcgaagatcggtacgacgagacttcgcctgcgacgaaatcagacgagaaagccggcgaaaaaccagacgtccggatgaacaaggggatttcgccagtgcaaaaccgcagtccggatcaacggagactgtctcgggagcgactacaatcacaacgatcgccctctcatgtgccttccacaccgcccactccatcgactccgccattgtccccggctccgcaagacctcgtcatagctgcccgagaagtgaccgtgcttacaaaagaacagcttgcaatgcacgacaaggttcgagagactatggtcgtcaagatggaagaaggactcgagatcgatcccccccaaatgtcatccgataatgctctaggcttacgttcgccacagactcgtttggaagaagttgacaatcaccctccaacatctcctttgaccgagatacagccttcttctcctgtctggaccgcgaagaatgtcgttatggagccggaagattcctctgctaggcgtgacagtgttacgccacaagataagcctgtcgttgaggcatgcgcagccgcgacgtctgattcgcctttgaagccaagtattgatgcagactcgagatcggatgcaacaatcaaaccggaaagcttacccaaaagttcgcctacaatggcagacgtcgccgagattgagagcgaggtcgactctgaaaagtctctcgagccctatggcaaagagtatatcgaatttgatctctcgacgtatgctgccgccaaagacctcctagcgacacgacacacgaaccgcacggatatgaactcggctatcgatactgtattgtcacaaaataactggacacgcgacgtgtccaccgctcggggtctcgaggcgggccagatcgactcttggcagatcgctcgtcacaaggcaaatcacccttcgacatgggtacgtcagattgtcgcctggcgacataccagaggtaaagaggaacacaagcgatacgttcaagctcttcaggaagagtggacacggctagacgaggcatggcagaagcagcgcgtcatcgttgaagaagagaacgaacagctgaggcgaatctatgaagccagtctacctcctccaacgccagtagtagacaaggacactaggcctgcgcctcgcaaccgaaggagaggtgcggtggacactgatcagcaaatgcttggtattcatgacggcgatgaagcgggcttggagcgcattctgatggcgatacgtcaagcagaggaagccgaccctgtcgctcgagcgagaaagacagaggctgttattccagacatgatacttgagccttctggctatcgtctagaatacgacgataacacatcgctcatccaagaccctctgaaattttacgacatgaaacacgagactgatatcgagtggaccgctgaggaggacgcagagttccgcaaactctatgtgcagtttcccaaacgattcggtgagatcgcggatcaactgccaggccgcaccgctagcgattgtgtcaatcactattacctagccaaaaaggagaaggctttcaaggagccagtacgaggtggcactcgacaatacaaggaggttcctatctcgtcgatcgctaacagcaggaacacgatcaccgctccgcgaacaagactggtcggaatggttcgcggtaaggcgcttgttacggaaccgacagacaaagatgctgcaggtccgagtccagccgcgccgactgttccgaattctaggaaacagactaaaaggaagctggacgaggcggacaaggtatctattaacccggcaagcaaagaagatgcctcaaccggtgtgcccgccaaggtgcgcaaaaagccgggaccgaagccgggaaccaagcgcaaagctactgctgctgcaatcactccgaatgcggctgcttcacctcaaggtgtagaaccttccgcagggacccctgctaaaaagcgaaaaaccgccaagccccgaagcaagaaggctgccgaattggcattggcttctggagagacacctctgatagccgctgcgactcgcccgagcgatcagccaatcgcgcctgcaactgcatcaacagtcggctcacaaccgcttcagcctgattatgtaagagggagcagaacgggttttcaggccttggaactaggggtttctaatcctcccattcctgcccaggctcaggctcaggagcgaccgtatacagcgaccgcctctgtcctaacctatcccgattccatgtctttccgccccggagcgtctactggcggatggtcgggtcaaaagtttacgtcccaggatttggaccagtcgaaaccgtatctgcctgccctcagagatttcatgtcaggctcgagagtcgacaaactgtcgtcgaccgatcgcacatatgccgcgccatcggcgcaataccctctaggggtcccacagcatggtctgcaacagtcgcctttccactcagccttgcctccaacccctgtcatctcaatcggtcagaacaacaaggaatcgtctgccccgccgcaggtgttccgcagaagcaatatcaacgatctgttaaacgccagcaatgatgaagctgtacaagcccccgcttctcggtccgcgccgcctccagagatagagcccgacatgccgaacaggggctcgggaatcacttcgccaccagcccgaagattcatagagatggacacatctgaattcatctacagccgtcggtcgccgatcgctgcaacgccgggtcttactgaacaatacccatcgccaggtctgaactcggaccggacgcgtcaacccttgcaggacccgcccaggtcggacttcgtcacagccgagttacaagcgaaccacgcgcgggatcgcgatggccgatatgcaaactcacgtgcgtaagtttaccgccaataagttgtatcttcacggccttgtatcgtgtacagaccgaagccttgaatatattgtaacatatacctagagtcggccagccaatcttagctgcatgactagacgtccctgttgtgcgatgcgcaaatcgcatcatcgagcaggatgaccatctgtcggcttgcgtgccagtttgcggttcacagatcctggggtataatttgattccgagataatgggatcaaatccgtcctgcatcaccggtcagattcggaccgtctggtgcgacgggcatagcgggggcgacacgaatgacaagtcaagtgatcgagagggccaggcacttgaggatcatcttcgcttcgtcttggcatcgtctagaattctaaaattgatctgttcccgtgggacttcagcccggacgtggccccccggtgccccctgccccagttgagagacggtgtcgttggtcggaccgatgcccctcctatagtaatgatcggggtcgcctgaggaacgagaagtcaccagttcagcggggggggagaggtatatatcttggtcgagggaatgatggcagtattatgttcgagtcacggctagatttgtccactgtacaacccgacactatcgtactacattaaacatgacctccaagcaagcctgggagacctcttccgtcgaagaaaagaagctcgaccttgcccacgatgagggttacgcaccttctcaggcgaacgtgctcatcgtcactcctgaggacgtgagttgacgaaatcagcacctacgacggcagacgatatcctccttgctgacaagattctttgccttcactcaatataggacaagcgggtttgccgtttgatcgacaagaaattgttgcccatcctcatttgggtctacttcctgcagattctaggtaagcgaccggaatttttacgattctttcggatgttcaaggcctgttgcgctaactcggcctttgtctcgcattcagacaaataccttttgggtcttgccgctgtctgggtgagctcaagagctgttgcgtacgaaactacttgactctaatcattacgctattcagggcatgagggaggaagccggtctcgttggcaccgaatacagtactatggcttccatgaacgccattgcccagcttgtttggcttgtgagcagtacagggcagatcaacacgtcaggtgctaacttttcgataccgtcatgcagcccttctcgtcctacctcctcgtccgtctacccgccagatactacatggccggtcttgtcttcggttggggatgtgctttgttgggtatgggattcagcaagtcgtacgcttcgctgtgtgcgacccggttcttgttgggtctctttgagggtgcgtcgtcaccgcctgaagaaaccatgtcaagcatcgtgctcattcaaccatttttccttactgttagccgcatgcctccctctcttcgccatgatcacttcccggtggtacaggagacaagagcagcctttgcgagttgctacctggtacgcgtcattgccaaattggcatttccttgattgcgcgcgctaaagttgcgttcaccaaaatcgtttaggtatggaaccaatggattggccaccatgtttggtagcttgatgagctttgccatcggccacgtcaagtctccccatatctcctcgtggcagttggttttcattatccccgcctgcctcactatcttgaccgctccggtcattttgtgggtggtgccctcaagcatcgacgatgccaagtggttgaacgaacacgacaaggccgtcgcctacgagcgagtccgcttcaaccagaccagtactggatccaccaagttcaaggttgcccagctcgtcgaggccctgtgggaccccaaaacctgggttatggtctgcacgtcgatcttgttgaacgccggagccaacgtgactgggactttcggtggacttctcgtaaaaggtctcggtttcgacaactacaagacctcgcttctcaacatgccctttggcgccgttcagctcgctgttattgtcctgcttgcctggatcgctacgcgtttcaagtcgaagggaattccgctcgcagctatttgcgttcccgtcctcgttggatgtatcatcctggtcacaagcggacgggccaaaagcgacgctcccaagaacctggtcggttattacgctctaggatttatctttgcaggaaatccttgtgagttcacaggcctgtcggatgatcagacttttcggatatgtttgaggtcgaaagttaggtcgcaaacacggtcttcgtcgcgatcggtccgatcgaccgttctgtcgcgcgcgcctcccttcgagacgaagcggagatgacaagccagagctaaaactcggggctgagctatgaggagggctgtgctgttgagaaaaaaccctgctcctctcttcggcgtctcaggctctacaaacgaagcgatccagaccttttgctgacgtccgcccattcgcgctcgacagtgattgttacctggttgattgccaacactgctggctcgaccaagaaggctgtggtgacggtcatgtacagtgagtttgtttgtgatgcccactgcgtcaactggttcgctgaatcgcgtgctaatatatcaatgcgcgtttacctgcagacatcggaagcagcgccggtaacatcctcgggcccttcctgttctcgtccaaggaggctccttactaccgaaccggtctcaagatcgtcatgggaatcttcgcagctctctttgctctggtcctcttgcaaatgttcctcctcatttcctggaacaagatcaagtccaagaagcgtgtcgaactcggcatggaggccgtgatcatcgacaggtcgatgatgaccaaggcggaggaggatgctgctggtgctgtggagcacgttgagggcagtgacatcgacgacgacgagaccgacatcaagaaccctcgattcgtctatgtgctgtaaggtgaaaagggcaggtgcagtttcaaggcggtttcaaagggcttttgcaattgtagtaaggtagcaggtatacacccattccgcgatattcaattacgtgttcgatccgatcgtgtttgttgtgtcatgggaacacccatgagcttagtataaaaagatggccagctcaggagggttccttcttgctcgaatctgtaaaaggcaaaaagaccgccggtacgattcgtcgtgcatgccaggccagtttgccacactcctcgcttcgtcgcagatcgcagaggcgcgttcggcgatctccggcagcgcgaatttcatagcgtagactcgctcacatgggccgtcgggccatccatcagagaccatctttcctaactactctactttcctgattcctgatttgattcactacttcagtagctcagtagtcgtcaatacgactgaatattgatcacaaccccggacaatcgcatcatcgaggtcagatcttcatcgcaagcatgaactcgccatacccatctcaacagcatctcgaccgcttcattaccgagctcgtcggagaagtcgcttccgctaaagtcgacgctaccagacacatcatctttctgcaaggagagcatggtctcaacaggcacgacactgaccgggaattgccgttcagacaagagtcaaactttcactacttgactggaagtcttatcgcgtcgtctaccctagtcatcgatctggccgtggaaggaggaaagcccggtccggcgaatcgcaagcttttcatccctgaagcgacggctgaagcgagtctttggtcgatccctcctccgagtctcgatgtcgccgcttcgcaatgcggcttttcgcgtgaggacatgggatattctggagctgaagatgagcagtatgtcaaggagcttttggggaacgccgagaagaccaccctcgtccacgtcatgtcgaccaagccgctcgagcccctctaccctcaagtcccctcgtggctctgcgagctgtttgatgcaaaggacgagcatgccccctttttctgcagcgagtacctgctacgtgcattacatcgagctcgtctgatcaagacaactcaagagatcgaatacatcagagaagccaataggatcacttcgggagctcatgaggtggtcatgcgcgagcttggtagatttgcccgccgtagagacgtcaacgtggtcggtccggacggcaaagtctcgaccaataagcgcaccgggaaagaagggttgactgagtgggagatcgagagtgaggcggacgccgaggccgtcttcgtagcaacctgcaagcgtgctggagctggccaggcttacctgcccatcgtcgcttcgggaagccgtgccagcactctccattacgtgtgagtcgacgaggcttgtccgcgtgaacgatagtataatttcccaacgctgcttcttcatagttgcaacgaccgacttttcccctcgaccaccaacgtcgctcacactccaacatctggtcagttctccactgcggctctgacgcacgatgccgctgcccctgtcgactcggcttcggctcaaggacgtggatgctgcggagacgtaccctcggaatctttcgatgatctccataacgggcccttcttacctcaggtcttgttgatcgatgccggatgcgagtacaaaggtggatacgcttcggacgtcacgaggaccgtcccggttgggaacgggggcaagttcacgtccgagggcaagacgatttattcgatcgtcctcaagatgcaaaaggtaagacagtggctcatggccaatctccttgattccgggacttgaacccctcctatctctctgctgatacaggccgcagaggctcaatgtaaggctggcgcgcactgggacgatctgcacctactctgccatcgaaccttgtgcgaagagtttttgaagctcgggattttcaaggacgccacggtcgatgaaattgtcgaagcagggctcacccaggcgttctacccgcatggtctgggtaggtcgacgtgtcgatgagcgcttcctgcggccgttactgatcaagccttttgggcatttcgcgatacaggtcactcgctcggtctcgacgtacacgactcgttgcaattgctcaggaccgaatacctgtcgatccccgaatcgtcaaagagattctcccacgtgttcaaatacctgcgtatccgtcgtcccctggaaacgaacatggtcctcacgatcgaacccggttgctatttcgccatgggactgatggacgagtacaaggtccgacagagtccctgggtcgatttgaaggtgctcgccaagtatatacccgtcggcggagtcaggatcgaggacgccgtggtcgtccgtgatgatggttgcgagaatttgaccatcgcggtccgggaggtggacgaggtcgaagcgatctgctcgggacgcgtctgatataggaactcgtaggtcatagggtcgtggaggcgaggcatgtctgagaaacgtatgaaatctctcgatcgtctctcgtccagcttctgtggaagcgagaaggatattcggtcggtcggcatcatcgagtttggctttaatgtgccgttccggaaggcgacgacgatgagctttgttctctggcacccggaggagcctcgatcgatgagaaagagactgttgttgatgttgttggcggtggccgtggccgtggccggctttcgttcaatcgcgatgtgtgatccccctcgtcccgcgcgcgcgtgttctggtgttgaaagggaaattgggcacacagcacgggggcacggggaagagaagcaaagtagcgcgatcaataatcaaagcggatctcgatcgctcggggacccgctctcttctcgcccattgtcgttcatattcgttgttccccccaacatctcgacgtcgtcgacttcttgcttcttgcatcataacaccatcaaatacgcctgatcggtttcatactcgttgccgatagctctaccacttacctttacctctttcggacatcgcgatccgatacctaccgcgatcaccacactcgtttcaataataatctctcgtgcatcccgcgcaaacaatcgaccgaccacaaacaacacaaaggacaaaggatcctgagaaaagaccgccggtgttcaacgtcgaatcaaccgcgatatcgatagcgaccaagcgagaactgtagtagaattcgaatgaaacggagccatctcacccggtaatctacgcagatccgatcattctgacggccgtccgtgttggaaacaagcacgatctgcatttgatgcggaatgtcgcatcagctcgacgggtccagtgagctctgatgatctacgagctcgaggagtcgagctgattcatcccgacaacgtaacgtatctccgaaatctatgtatacatagatctaagcgacatgccggccttgacgagctcttccttttcaaacacctcgaccttgcctagaacgcccacccattccgcgacattctctacaccgctgaacaaggatccgaatctgcctatcaatcctctgttccgcgacaacatgaacgcctcgccggtcaacactcggctggcacctgcccaaccatctgtaagcaccagttccagcgctcctacggccatcacggcgagtcccggtagtccggccagacgacctcaaggcggagagtcgacgacgatcgatcatgcaatcaggatggcaggaggagacctgatgagagctttgagatcgctggtcgaggaacgcaattcgctcgtgagtctttctcacacccgaaagcccaggaccgagctgagatacttcactcccatccttaggctatccaaaatgctcagctgtggaagatggtagagaagcggcagacggagaagacgggcttgagagatgacctcagccgggttcagaagcgactcaggcagctcgaggacgaggcgacgctatcgagctcacagtcgtccccccgatcgggggctggagaaacctcttccggtgagggcgaaaagtgtcctccgagcaggagacgagctgggacgatcacgggaagagagaatcgacttcaaaggcccgagccaggacaacgatcgtactcggatcaacctgatctcccgggcaacaggaatcggcgggatggaaggatatcaccactgcctgactcggaattgccgttccgcacgatgaaagaatcgctcagccggatcgagagcgcgaactcgtctcgttctgaaaactcgggtcacggcccaagccgggtcgactacccggaagaggagagtccgagcaagatgaagacaccgatggcgaccagggacaggacgcgctcgactgacgaggacgaggatacgccgacagggaaacggctccaagcaggtcttctgccggccccgcctattctgcacacgcctacctcggacaaacggacgaatgcggacagtaggatcgcctttgatcccgaagtacgagaatacctggcactagctcaaacacctcctgctggccgagatggtttccccagtatacctggaccgtcacgcctaggatcaggtctaagccctgggtctagcgcagcgccttccagactatccacaccacctccaccaggagagagcctgcctactttgattcccgcatcaccatactcggattcgacagacaacaagtctttcgtagaagcgagcggtttcagaacgccggattcgaccagactaggagagactgccagcaagacggagaagcacgatgccttgtccgtaaagtcggcaccggaagtgcgaccaatgttcaacgctcaggtcgacgggccatcaacaccgatcagtatgcaaggcgaacctgctgctggatctcgttcaactttgaacgaaaacgacaatctcgggaccaagccgtcatcaaatcccgtacgacggcaggagtcggtccgcaaaccttccggaaccaagcaaattcatatcccacgcttggtgcctcgccttcttccatacacccgctgttcgattccatccagccggattgtgcccaatacgctcggcaaggaggccctttcattcatcgtcagcattaaattgcgtccacctggcgatctgcaggtttacaactggaacgtggccaagtttttcagctcgttcgtggaactggacgcgaaaatacgacagaagatgagcaaaaaggagttgaagcaggcaaagctctcgagtttgccagagggtcgagcttggaaagactatggtcctgccaagatggacagaatgaaggtgagactgtccacgtcgtctcgcacaggggcaagcgatgctgatacgacccgccaggcgactctcgagacctacattcagaacctgctcgcttgtcctttggaagacaagaacgaagtctgctccttcttgcaaacggatgttgtcggtcaacaggaggaagaacggggggctgggatgcctaaatcgggttacttgacgaaacgaggcaaaaatttcggagggtatgtaacccatgcgacgttcaaatctttgccgtgttgactgatgtgttcagctttagatggcgaacgaggttctttgtgttggaaggtcccgccctacattactacgagcagcgtggaggggcgctgctgggatccatcccggtcgtcggtgccaaaatcggaaaacagcaacaagactggtcggctgatgctggagacgaaaaggcttatcgccatgccttcctgctgattgaaccaggctcgggaccgaatagtaatgcaacgaggcatgttctatgcgccgagagcgactccgaacgtgactcgtgggttacggctctgatgcgccatgtcatcggccaattcgatgaagctggacggatgagcacgtcttcgtccgccagggaagagctcaacggcgtgatcgagtcggccgctcagcccaacccgccgcgggcgtcgaccagctcgagcatgcaagatttgcggggcgtgctgtcacccaatcgacaaaacagcagagacgatgtcgccgtcttgcgagggaccgctcaaccgatatcagcattgtctcccaacggatccaattccaaactgttcggcgctggccccacggcttccttcatcaacaagcgagagcaaggcgctcccaaacctgtattgccagaatcaagatctaatcaccgccaatctcctctacttcaagggggcgttttcgacaatgcagagatttccagctctctaccttctcacctggacaccaaatctgtctcgctcagcagtctcacggatattgtagactcgcctgctcaagaatcgccaacctccactcctgtgcgtcagaagaggcagagtatgatgcctggcagacttgtcaaggaacgttccgagccaacgaggccgtcgccaggtccttctcgtctgcaaagtggtcattccgacagttcctccttggagcgagacgtgcccaaaatcgaccgtggaaagatatcggcgcctaacggtggagtcgtcattccccaaggcttcatgtttggcaacaaggaagcgaacaaggagccagtagatcgggagcgcaaggtcaagtctagactttggggtttcaacaagaccgcgccgccggctgtcattagtcggcccgtgttcggcattccgctgaaagagagcgttgagatcgcgtctgttgctgggctacctgctgttgtcttccggtgcatcaactacttggaagctaaaggggcgcaacatgaagaaggtatcttccgaatgagtggtagctctgctgtcatcaaaggcttgcgagaccggttcaatgcaggtgaggtctagctagtataagcaaagcaaatgtaggtcatcaagttgatctttttcgcttcccccagatggagactacgacctgcttgctcacgacgagagatgggacttgcacgcaatcactggtttattaaagatgtttttgcgcgaagtgccttcgatccttacgcacgaattgcatatgcatttcctcggtgttactggtgagcctagcttccctcggtcttgtgcagaaaacgtttcgctgatgtagatatcggcagatctctggcaaaccgaggcgaggattcaagagctcacccggcttgtcaaccttctacctatcgaaaactacacgctgctgcgtgccctcgtaggccatattattctcatctgttcgcacgccgacgagaatcgtatgggagtcaagaacattggcattgtgtttgctccttcgctttgtgagcggatcgttgtcatgcttacgccttgcatgcactgacgaataccgctcattgtgacagacatgccggccgggatcctgagcgacatgatccaacaatacaaggccatcttcgagggtgaacccatcgaactgggcccgggtgaagcgcaacccgttcccgcccagtcgacattagagcaatcgcaggcagaaaagactttgtcgcttgccgatgtgccgcagccgcagtcgatagagctgaacaagagaggaaacaggaacagcatgatttacgcaacaaactcggacgtgctactgaattcagtcggccgtgaacttacaggtgagcgtgactctatacagctgtatattttctatccttgctgacgagaatctcgcttgatcgatcttcccagaatccggcgatgctgaagaatctgacgggggcgagatcgtggcatttgatgatgatgacgactaccctctttcgtcgcctggaggctcgccttcggtcgagggcccgtctcatcgcgacctataccggatctccgaagcagcctccatagtttcgccgcgaacccagacatctcaaaaatttcctggcctgccacattcgcctcgtttggccgacatgaccggtggtttcggcacggacggtatgcgatgatctcgtacagctccactcgatttcatcccaactagataccctttataatttcgtcgttggaggaattgccatcctttctctaatcactttgttcctcgttacatcttgtactcctacattatccacgacgcgccgacacgaccaaacgaatcatgatcagacgatacgaatatgccttaaacggatgtattcgtaatctgcatacatcttcttggtagatgccctattacaaccgtgtttgtacaaagtgtttcttacagtggtgtcggaagaaatttgagacatacacgtcgtcgaagtcgactagggtcttgaccctaatccatcatcgagtttggtccatcgtcgctggtgatgagcctgtaaaggagatccagtcaggcttacagaccctatctcgtggtctttggtgacaagccgactcacggatactcgcgcaccaaggcgcattccccgccttgctgcaggtcgatcgcgtacgcctgaaacaaaccctcggcggtgatgaccaagacgtgtgacgagtttctgcgacaggccgagcgatccgcaagactcagctcggcgatttcgcgatcctcgcttggaactttgcatcgggagacgactcacgggctcatagccacgacgctccgtccaccagctccgcctcgaagtttgcaataagcgaaatctcgcctaggttcccatacctctgtgacccgatttggcaggtatccacccatcccagctaccaggttcttgcccagatggaaactacgtcgcgaaaagctcgctccggccgaatgcgccgccgctccgtctgcgagaccacccggtcgactcgtcccgttccccgtcgaattggtcgccgatagggtgggtgaggaaggagcttcggaagccggcggagaatgaggttggacgccgccgtgcgaatccatcctgctcagatcccctcgtttcccgcttgaacccgcaccgctcccggatttccccgtctccaagaggttgtagacgtgcactgtctcggtatccgagctcacggcgagcaaggatcccacggcgttaaagttcatgctgaacacgcgggcgctctttgagcctctccggtactctcccagcttcttggcgtcgggtacgctgaacacccggatgacggtacccttgtcggaagccgtggcgagcatggacccctgcgaactgatcgccatggcggcgataggggatttgtgcgcttggatcatgttgaccgcggtcagggtgatcgtgtcgaatatcaatatagaaccaatcgacgaggattgcgagggacctggcggttggttcgacaagggagaagaagccgtaggcactggcgcagggtaggccaggtacgagttgtcattcgaaggagacaatgcgcagatggctgcggccgagcgacgtggatcagttttcgaagtctcaccatggctgatcgcccgagccgcacgacaacctaccgctcgagtttggaccggtgtcaagcgtatgcaagagcttcatagtggaaatgtcgtagatgtaaatctcgagctcgaggacgactaccagcctctttctgttcatccgcacggcgaggatggctgtaggaaacaagagctcgcagatggtcgattgtcgctaaggaatcaaaagcgggtaagcacgggcccgatcggacaattagcaggattgttggcgctagagaataagagagagatgcctgcacgtcgagacttgccttggtattgacgatctgtaatcgtctcggactggctgatggcttgtcaccggcactgacgagcgcgaccagcgaggtgcagaacaacatctctacgatagccgtcgctccttcgtctacgatggccatcatcattagaggaacggacaccgggcagaagaagtatgtcagatacgagtttccgtctagcagtgtgacgaaaggacgaagacgagaacaagggatgactcactcttggaatacatcttgccgtatggatcgcaattgatgatgctgtagcccttcttggtgcctaccgatacgcaactgaagcaacgatatggtttcgactaccttcagatattgaatctaatgtacgtgatcgacgcaagacttgcctgaaatcttgattgaaattgcacgactgaacaggcggcaaggatcaaaaggtcgaactggatcaattcgggctcgcggatgacgttagttctatactcggaaagcgtaccagcaagtctggatgctgtttggaggtgggcatatcgaaacgagcctagtttggaggttctggctcgaggtggatgttgaataccgcttgaaagggcgtttcaaactatcggtgttggaccggtcgtgctggtgagcctcgttgcgccgggaatgtcccgtggtttccttctcacgaggcagacaagggatttcaaaacacagaaatctttcgttctactgctttggatgaacagggtgtactggatgtagaggaacggccagaaaccctgacattgaccttgcccttgttgatatccggtacgaggatgatgtgcggtgctgctctctcggtgctgaccgggcgaacccaagactctcagattaccagtcggagtcagatcaaaggtggaaatacagcgaaataacgcacagtaacatgcatgtcgtgatgagcccgacgcagaagcagagtcgatgtgtgtgcttggaattcactgtttctcatgtatccagtcacatcctattcaatggtgaatttggtcatcattttgacctcgagtagggatgtaaagatgcttcaaacacaatcgattcgacaaggtgcaagcaagggactcccccccggtggcccagttcgcgcgtcgatgacgaaatgaggaatctcgtaatctcccgtttcgatttatttccaccttgaaacatgatcgtctcaaggagggatcggatcgggccaggtcgatcacctaggttcacatgtaacagcttgcacactgctatcttccagcaacgaacgactcgttcctgtcctgatccatcgatataccttctatagccgacaagaatttgaccacggataacctcggaaccatgtctgataacgcttcgcccgcacctgtcggttactgggaatacggatgggaaaagtgcaagcgtcaaccgctcgtacctctaggtgagcgcgctcgtacgagcagatcgagcagagcgtctaggagagtctgctgacgtcccaccgctctatcgtgtgtttcgactgataggtgtactagccacgtgtggtgctcttatcggagcctcggcatcgctcagaaagggtaaccgagagcaattcaacaagtacctgcgtttccgagtagcgtgagtcatcatctccccggggcataggacgagtcccacacgtttctatcattctctatccctgctccatttgctcatcccccttgcttgtatccggtagagctcaaggtgtcaccgtcgtcgccgccgtcgctggtacctactttctcacgaacaaaccccaacaagtccgggatcgccggcaacaggtcctcacgaaccaactccctcctgacccagactcgatcgtggatacttcccccgcatcgaacctgatcaagcccaagaccacgtcttcctcgaaactggccacgacctcgctccagacccagagccagagccaggacgtttcgagctccggagcatctgaacacaacaggttcgacaggggaccgaggatctcgcaggcgatgcaacagacggaaaaggcgctcgaaggtggggaaggagccgtcaaaccgaggagggtgagcgagtttggcaagaggttggaagaggccgagaggctccagaaggagagcgagaagtgaatgcgtggaccaggataggtcgtggggagatggtcgggaaggcggacgacatcggattgacaagtgtatcaacagtaagagatagtaatgtcatgtgaagcgtattgatcacgaccgacatatccccgaggcggcatacgatctcgagagatcgacggtcagggtggaagctccacgttgcaagagtcgatgcagtgggctcttggaacaatagccgtgcggagtaatatggaagacagctgttttaaaggagctcccagtcccgcttcaaaatttgatgctcatcttgggtgacgcacggccgatcgccctaccagatcctaggggccacaaagcgcgaatcgatgtacgacggacgggctcttcaaaatacagcgccgaaggctacgtctgaactaatgagaagaagatcgccctcggaaaagcgttggaggtgtctattcgtcacactttcttcgacatcgagctgaaggcgaaatcaatcggtgatgacgtcgtaacgacaggcatgcagcagaacggcgtccatcggctatggcccttgtctgacctatattgagcgttcgacgactccttctgcttagcttatggagatgcgcggagctcgtaggtgcgaattgagagtcaatcggtgcttgtgcataataatgagtagcgatcgcatcctgacgatgcagaccacatggtattcgtattcagttccaaagtctaagcctacgtctggccaagcttagcgaatagtttagaatgcggttcacaagaagagaccaagaggacccggaacccggtaggcaacagcttgaacgatgtgtctgtttgcataaaaacggaagagcgggatcgtctatctttcttacaagctttctatagtgtcccctcctggtacaatcacatatccctatggcagcagcatccctcgtcgcaacgacccgtcccgaccctttgcgtgcgcaaaaccttgtgtgactggatgcaccggcagcccccggactgagtagtcagggaaccggcaccagccatggcggtcttgtggtcccgcctgcccttcaggctggcgtacggtgccatttcgatcatcagtatgaccggtcttgatgcagctgccgggcttgagaccggactcccgcagcccggtcgaagacataccttgaccagaagttcggtgacttggactctccttcgacgacgatgaagccgtgttatgctcaagcacaggtctatccgccttcgaaggtccgtgaggcgagccccatctgcgtagggaatgtcccattcccggagagtatcgaggactagctgcagggttccctctgactctttcttgagcgctcgatgccaaggcgcatgtaacgcaaactaagaccccacgggaaccgtcaaaggcattcgtctagccgaccgtaacatgacgagcactcactgagttttcagggttgatctctttcccgatggcctcggccctcttggcggcggccaaagacatctcgcatttcttgctgttcaggtaggcctgtttgatgtgcgtcaagcttacagtcatcaatggcacaatcgcgtgtgaactgacctgagcgagaaccagcatcaggttcgtctcccagcaggtaggaagatcctgttccctcttcaagatatagtcctccacctcctccactaccaattcgggctcgtccaccgacaaggccttccacctgcgatgcatccccagccaaagagtgagagtaggatgccgatacgtcccagggatgtcgggagaatgaggagtggccatgttttgcggatggaggctgtctacagtactcggggccaaggtactcgagaagataagacaggattactaataatgatattgttcatacgtgtgcagcatgtgcagatggccggtcgccatacctgaatcgtggccttcctcaaaggtatacatatgtacatgtgatcgtgtgattcctgaattcctgatcacaagcggttcctcgccttcgaccatcacacagaccctcggtctcgcatccgtctgaaccctcgtgagaaatctatgcgatgcgtcagaggacggtcagcagacaaggtacgtgtgaggtcactacttattacaacaaatcctcaaacgcacgcgctgcaccttctcccagtcgacccgtactgcagctactgcagaaaggatgtttggtgaaccacttcgaaacacagatcattccttgtgaccccgcgcgctttctcgaagtcgacaacggggcgcgattgagttcgcgctatgcaaagcgatgaagccatcgcgcacatgcgacgcgtaagaaccactcaagacttcgcccgaccgaggcgtcaccgttccgcaggccccgcacgcggacaatttcaagttaccatgtccagtcatgcaaccaatgctaatgcaatgctaccgatctggacgtgaccctcggaaacgcttaggggtgagaattttatcgaggctatcaagctaggcctattgatctgaatctcaagggtccctctgctttcgctggcctgcttgcgctactcgccagccttatggacacggctcgtcctcgcctcatttgcgtttaagaaagtaagtttggatcagtctgtgctgcctttccccaatctcctcgcagggcctcgtgggcctccgactacagccaatagattgttgtcaagaccgcggtgccgctgacgtggatgacgtcaggcttgaggtacacaagctagcttgtcaatccgcatactatacgtgtcacctctgcttccttgcctttcttgtgcaatttacattgagatcctgcaaggaaccaggaagaaatgccgggccgaatcttgaacgggagtcaaggggtccaaacgaggagacgcgtgccttgtttctgctcgtgaaacgagtcccgcgcgccatgtcgaaccgcggcgcggcgcatgccgcccttcagacccgacgaatgagccactcctttcgctcctgaactccttgcgacctcctaaacatccagacaatgggctcccttcaaccttcccctaggtgtccatgtctcgatagcgctcttccaagtgtgtaacggattggtacgagtataaatgcaggatgattttgccaggaaatgcatcacaatcgaacgtctcaaattgtcaagcatcaactcgaggtcggcgagatttctacagcttttcagcacacaaaatacccacgtacactcttgcagacatgactatcagtcgaaagtctctcgcggggctcttaccgctctatatggccctggtggtcagtgcgtcgcccctcaaccttaaagtcagacaggacgggggccagaccgccccagatggtcaaccgactgatgcggtacccacggagaactcctcttcgaccaatacagtctaccccactgaggcagctggggctcctgctcccacatctacgcagccaggttcattggcatccgattggctgtatcaagggtgtttcgaagacacgatggaacggctcctgaaaggattctatattgagagtaatgcgatgactcgtgacaagtgtttcgctagttgtcaaagccagaacttgccagttgctggtctagaagatggtgagtaccacgaccgtcaaagaactcggtaagggcaaggcactcactatatcgtggtttgatgaaaggcaaccaatgttactgcgggcacgaaatccctccatggaactacgcgcaattcccgtacgaatgcaacaagcagtgtgcgggagctccgggatctaattgtggtggcagttggcgtatggacttgttcgcccttgcgaacaccccccaagcgccaccgctcgcaacgaacacgagtggtacggttccacaagaaactggcatcgatccaaacagccacgccgcgcttcccaacgacaccgtaggcaccaacggaaacgcggtaacggctcctttgccgacagccagtgatgggtctacttcgaccggggccgttcaatctggacttgatactacgcagactggagtggagcctacacaaaccggattagaagtagaccctcaacagtcgtccagcgtttataccgaaagcggagtcgtgatgaccgagactcaagcgaacccccaggaaacctctcaggtggctgatactggatcagtcactctcaccaccgagactatccccgaaggtaccgcgactcagactctcactgccaacgacgcagctgctaccggggacagcaccattcagagtgctgatcctattgataatgctgccacgggcggtcccaccacggtgattgatcctgctgcaaccggtggtctgaccgatactacggcgactaccacgaccgatactgcagcgatcggggcgacgaccaccgcatccaccacgaccgatactgcagtaacttctacgaccgacactgcggccgattctacgaccgatacagcagcaacttctacaactgatacagcagcggtcgggccgacgacgaccgcatcttcaacgaccgacactgcagcgactagcaccaccgataccgcagcgacttccacgaccgatactggatcaggagccccatctaccttggattctgctgctgccgctgctgccgcttctgaaccgactcagattactcaggagaacgcggccgcgcctctggtcaccactattcctggatctaccatcacctctacctccgaggtgaccagcactggggccgacaatgtggttgctacgcagacgacagtggtgacgatggttcaggccccgctggtcactaccattggggctgaccccgccgctactagcacggccacttcggacctggctgctaccagcacaaccagcactgactcggctactgctctcacgaccagtactgactcggcaactactggcacgaccaccgctgatacgaccacggctggtcagcccgccccgaccgtggtcaagcgcttcgtcggcgagattgagagtttgatctccaagctcaaccagggcgcggacactacctcgaccgcctagacgcacgagtcgctagagcgacggacaattcttactttgaccattctttcaaccgattccatgatccatgtaacactttaagatcttttacgacattcgtttcttccccgcctgcacgtgcttgacctttgtgttgttcgaaagaccggtagggagtctgcgatccggcatgtggactctatcattatcaaagatcgagcgcctttccgctctctgtggcgtaaaatgatcatactaccggacgcgcaccgaacgacatgatgactcctcatccactcttcagcccgactcggccatcgcgtcacacacacagtctctcgcttgagcagttgagcgtttctcaaatgaatccattcaggattacctgtactagtggtctcactgcgaacttgccaggcaacgctggaacgatggacgaccgcaacgcctagggaccggtacacaagaccatcaaggggcttggcgcgaagaccgggaactgctgtaccactcccggttggaactctaaactatggacccttcctgcccgggctttgttaaaaacgagtccaagcacaggaccaaagtgcgattcaagcgacgaacaaatcccagattgcatggttctcatcgtccgacgtgatgtccttcttcccatccaccccatggcaagtacaatcaaaagactaggggtcgagacgagacgcggacacccacgacggggagaggatgaggaacatgtctgtcccaagaaaagatccgtcgaaaagtagctcgtgtgcagcgtaagaagaagaggggataaacaagcttgataggcgggtttcgattcgctcgtttacttcttcttggcggcgactgtgggaagggcaggagggaacacgacgttagcgtccaaaacgttgctacgactcgaaaacatggcagactgggccgggcggcaacgtaccggtccttccggatcgacgaccagtggtacaggtgtgctgaccacggacacggagctgccagtagtgtcgcaaacccctgtgggccctgatcttcttcaacttctcaatgtcgtccctcaacttctggtcgacaatgttggagacgacgtgcaagttctttccgtcggtgatatccttcctcctgttcaagaaccaggtggggatcttgaactgggcggggttctgcatgatggtgacgattcgctcaagctcgtcggagttgagctctccggcactacgggttaagagaagaggggttgaagcggggggatgcacgtcagtcgagtcgtcatcgactacctcgcaagcgcagggtggcgactaaccgcttgttgaggtcgacatcggccttcttgcagaccaagttggagtaacgacgaccaacacccttgatctcggtcaaggcgaactgtcgagcacgaacgcgaacatgcatgatgtcagacaacatgtctctcttgaccagcctgcgcgccactcaccatgatcttccttcgtccatcaacgttggtgttgagcaaacgaagaatgtgctatagatcaccgaacgtcgagagaaggtcagtctcgtccatccgaccggaactgacagggcggcgtatgctgggtgaatcgactcacctggaacgagatgtgggcctcagggggggcgagaacggaagacctgtccggaatacggggatggatgtcatcagtgatcgatttcgaggctagggtgttcggggtaggtctctcgggggaagaggagagaaagtggtctgctcagagggggatcgggatcgtgatctcgtggttcgtggtgcgtgcggggtggacgtagtttccggttggaaagagaggtgtggtcgggactgatcgtgttttggccgaggatgggtcgagttcaaagcggtctcgcgaattcgtagtggagccgagcgcaagggatagcagatccgcctcgagggaccgtccgagtgaaaaagtggcaacgagaagattccgccaaggtcgtctgtgccgaatgaagattgccatctcccgcgattgttgcctgcattgatccagaccggttgacaacttgtcttctttgtcaaatgatgcagagcgccagagtcggccggtcgactactgcaaacgacagcgttgatcctgcgggatgcccgacagactgggctcttggctttgccccgaaaaaggtatgggcccatgtcatccaggatgtacccatgatcatgtcgtgtgggctgtcgaactcccagtatagttcccctcgaccgtcgttgcgtcgttgaatatccaagtcacgttgtccgattccccctcccggttgcatcacgaaaatccacgagatccgaccgagaccccctcaaatccaacactttcgaacctcttccccctcccgcttcccctcgaggacggtgagagagcgtatgctcccccaccacccgcggcgtagaacggaatgtatatctcgatactcacatcttgaagaaggagacttgctggagtgaaagactagagaagaaaagggcgggaggagagtgtgcgtgaggtgagattgaattcgagttgaagtcgttcgaaatcgacctggtccttgcgacgagtgagcgagcgagcttgcgacttaccgctgacggggctgaggggagagcgtagcagagagagagacagggagagcagcgggctggatgggctagctagggggtaagtagcgaagagtccgaggtctcgagcgaaatcgaaaagggggtttccctccttaaaatcgtgtcgagcgcgaaggggggacgtgcgcgcgcttctgattgagcaaccgagacgagtgagtttgacaagcgcgacgtctgccgaggaggtaaacaccgagagcgtgttgacgagatgtgccgcgggggatgacgcctgctgggtgtcgtcacgtgattgaatcgatggttggaagccatcctccgttgaacggcagccaatccagtcggtggtgcacgtcgccctggacctctggctttggaacgggagagggggggtagccttgccagtctcttgtctgccccctagccctcgcctctcacctgcctctccctctccccgcttgcccgctcactcacacaatccctcgctgccagtcgacgaccggggcgacgacctctcgaatcccaaacgcacctcgacatcgtcagaacggacctcttcaaacccatacccatacttgacgtccccgcacatcttcgtctagttccactcctttccaggtagatcactcatcgacactcggcaaaaatgtacgcacgaggttgtggctcccccctcttccctctcttcgtcccgtccgctctctgtctctctctctctatctctttttctgtcgtcgtcgtccgtcctggctgtctctctacatatgggggaaatccaaactatcgcaattgggagaggaacggcccgatcgcttcgtccggaagagctctatgaactctgggatcgacccttccacaggaccgccccccggccagctcaacccgtctaaaccctggtcttccccctccgggtcatcggatcgagggagatccgaccttgccgagcgacctgggaggtcgaacgagtcgggcctgaagaccatgggccagggaagagctagacgagcgcgcgtcttgcctgggaggagatgatcaggagcgatgagagcaggacctcctgggcggacgatcgggcagaaaaccagggatgggtgtcgatgtgatgggcggcagacagagacgggcaaagacagacaaacacagagagagagagagagagagacggaacgagagggattttcgagcggaacgggttggaacgtgaaggctgatccagtcgattttcttcttatcattcctttttcctcttctcctttctgaacctcgacccgatttccgactatcacctggacctctcacgtacgaaatcgctcggacacgatcatcaatcggaaaatcacaatatggacggactacttgacgatcatggacatgcccgtgtgtgtgtgtgtgtggacaatgttggaatggattcttgatggaaatgtgctgcttgtgactcggcaatctaatcaactgggatcgtgcaaattggacactcgacaaacgccaccgaaccgacacgcatggtgtttgtgtggaacttctgatgatggaattcccggcacgtggacgcatcgtgacaattcgccgctcatcgaatgtacctgccctggacgatgctgctattgttggggggatttcgtagggtcaacgttcccaagacccgaaggacctactgcaagggcagggagtgcaggaagcaccaggtacgtcgaccttgcgcggctcgcgtacaatcgtcccgtccgagcaacccactcatcgtgacctcgacactctcagcctcacaaggttacccagtacaagaagggtaaagactcgttgatggcccagggaaagaggcgatatgaccgaaagcaatccggttacggaggtcagaccaagcccgtcttccacaagaaggccaagaccgtgagtacaaatcgagtcgagtcgccatgcgagcgaattgctaacaggcagtgctcttttcatgacggcatggacgctcgggtagaccaagaaggtcgtccttcgattggagtgctcttcctgcaaggccaagaagcagctcgtcctcaagcgatgcaagcagtacgtacaaccatcttcccccaagcccgcctcgttcatgtgccccgtgcttacacctgcaccttccgtgctctgcagcttcgagttgggcggagagaagaagacccgtggtgccgccttgaccttctaaacgtctcgcccttgatcacaagacgaggtagcctgaagtttagagatccgacgagacacacgcccgagaggggttgtagttttttctggatgtcaggagaaggggggaagttatggaacatgccaatcttcctttttcttattcctcttgtctgcatcttttgcctatttgcgccctttccccggccgctcgtcgttgtgctcgagatattcccggtgtgagatgtcgaaaaggcttagagcacagtgtcgtccagtgaggtagcaaccaccctcatctcaagcctgtcgttgtggcttatgcagactagatcgtgaccagtcgatgaaaccaaaatggaagtgttctttctcgcgcttttcgatagattgggaggcgggtgaaagtcgtttcccgcgaatcgacgactcgttttcacgcgatgacatcacctggatcacctagtcgcaacccgtgttcgatcgatttcaactagagtaaagtacaacatcctgcgtccgtacatcatacgatctcaatatcaacggtcacttgtaatcactcggctgcgcaaatactccagaccctttcgcagcaatcgccccatcgaagcggatcaaagtagacccccgatcagcacacccaccgacttgagcgaaaatgtctcgacaccgattcgtcagaaacttggacctggatggtacgtccctgatggatccagctggccgttgcgggtctcaactttgatgatgcctaatctcatgcctcttcgaccacgcttgtagccgagatggcgtccgatgaagagcaggaggatgagctcggcatgaccgaagaacagcaaggtgcgtcatccgagtcgtctctcaactacgactctgacgatgcacgcactgacgttgtctgcttcgcctcctccctcattcgacagctcaaatggccctctctttgtcggtcgccaaacctctcctggctgacctcaagcctgcactcaccgacgatgcgatcatggagagcttgtggtattactactttgacgtggaaaagacggtcaattacctcaaggcgcagagagcaaaaggttagtcgagcgttttcgagttacgtggtcgtgcggtgtgattccgtctcggtcggaaggtatgtcggaacgacatcacaaagtgtctagcgagagcgaggtgccgggagaaagctatatgggaaatactctggacaaaggggtacgtgcatttttctcccatcatacccataccttttccccctgctcactctgacggtccttagctgacctggcttgcattcttatttccatcaggtatcgagagccctcgtcgtcccaaaggcaagcggcctcctcaactcagctcgggcgacggcggtcaacaagctgcatccgagcccggccctcctttaacggcgctgcaacgactagcgctgtcgagaaagcagtccgctgctggatcttcaggccctctctcaagccagaccccaggtcaagcgaagcgaccgggagaggagataccgcctgccgggaaaccgatgagcaagctggcacagctcgccgctgcgaggagggctgcggctgcggaatctgtcacggcgggctccacacctacaaagccacaagcgccggtcgaggaggtcgtacctgctgctcctacgatcgcttctgagccagacgtagccaaacctctgtccaagctcgctcaacgcgtggcagcggccaaggcagcaaaagctgaagctgatgccaaagccgccgtggcagccgtagcagccggacaagtctcatcgccaagcgaaatgcccgtgacagacgaagtcgccgcaggccagagttcgagtgacatgcagatcgacgtcggggaggagcaaccatcacccctgttcttcttcccaaacgcgctcaaggagaacctaccaccgtccactgcagcgggacccagtccattcgctattgccgggacggccgccatggccaaaccggcagggtcgaacggcccttccgtattcttctcgctgttgacggctcggccaaaagatgcgctggtcgcacctgataccactcgccatgacgaatcagttgcaacggggaaacacaatcctttcagcgagcctagtcccgatgaccttgtcattcgagctagagaaggcaccaaattcgctacgaggcagtaggacagagcgacaagcgtgtgtctggcacgtagtgggagggaaagagagggcgaagagtggatcattcaagcgagctggaactttacgacaatcacgacacctgtattaacgatttttctttgcatatttctcatcctcatggctcatatgaccgtatctgtaacatccttcggcggtcctgatcacgcccaatacagcggaagcgtcaaaaaacaaagcatcaaaacccgccccggccacaccagccgcgtcaccgaaaccgaaaaccaagatcgcacctgccagcaagactggcaacctgaccccaagggcgggaggaagcaaacctatcaaccctagcggactggcgacggatattgccgccttgggaatcagcgacgatagcgctcctgtcagccgagatgacaccccgatcccagccatgagcatgaagaggatggaattgatcgaaaagatccagaaggaggaagctgaaggcaagaagggagtcagcttggtggttgttggtgagtctcatacaggttgcgattggtaaacttactgacctacctttaacgttggaaggccatgtcgatgcggggaaatccacgctgatgggtcgactactgtacgaccttggtcgtctgtccgaaaaggagaagactgcgaacgagaggggtagtcagcgggtcggcaaatcgagtttcgcctatgcttggggattggatgcactgggcgatgagcgagatcggtaggtcaacacgtctagagagctggaggtgtgcatttgctcatgaccttcgacgcatcactacagtggcgtcacaatagatatcgccactacccatttcgagactgcaaaccgatcatttacccttttggatgctcctggacatcaggatttcatccccaacatgatttccggcaccagtcaggccgacatggcgcttctcgtagttgacgctgcgcctggcgagtttgaggccgggttcgatcgaggcggacagacacgcgaacatgctctcctggtcagaagtttgggtgtacgggagctgatcgtcggagtgaacaagatggatgccgtaagtccttgaccagaccgagtcgtaatgaactagtccgacctaatctcggatgataggtaaactggtcgcaagatcgtttcgaggaaattcaagaagcgttgaagccattcttgcaatcggctgggttcctgctgaacaagctcacatttgttccggtcgccgccatggagggaatcaatttggcacaaagggaaaactgttctgaactggacgcgtggtactccggaccaaccttggtcgacatactcggtaagcagcctgtctgccttcatacctattccctttcctgattcattcccggaacacagacaaggtcgaggtgcctacaaggtcgctcgaagcccccctgcgattccccatctccaacgtgttcaaggggcagaccgcggtcgcttccggcgtaggggttaccggtcgactgtccagcggagtcgtgcaagtcggcgagagactccgggtcgtccccggtgatgagactggagtcgtgaggagtaagtcggtactagtcttgaattgaagaatcgtccaactgacctctatggatggctcagctatcgaacgcgacgatgaaagtgtgccttacgcatcggcaggccagaacgtgaccctctacctggcacagatcgatccgatccacctcaacatcggttccgtcatgtgcccactggcgattccagaacttgtgccgctcgctaccagcttctcggcacaaattctggtctttgacatctcccaaccgatcatcacgggtaccccggtcgagctcttccatcattcgaataacgtgcccgccaccattacgaagctagtcagcgtcatggataaggggaatgccgtcaagaagaacccgaggtgagtctcgacgagatatccacccacctactgagagcccatctcatctgtcccatttcctgctatgcagagtgctgcagaagggtgtccaggctcaagtcgaggtaacccttcgaaccccggctcaggcgacgatcctgagagcacctgccatcccactcgagcctgcgtctgtcaacaaggagatgggccgtgttctgcttcgacgaggcggggaaacagttgcggccggtgtggtcctggagatccttgcatagaggggggtcggttgccccaccaatttctgccacatttgcatattgctattttacgccctacattgtgtccagtatcgcttaatcatacaatcgtgtctttggccttggctgttgggatcgcctttggtctcctgagaaggccgtgccaaatcccctttctgaaaggttctagggcatatttcgtgaaccctggcgcaaagcctatcgaagccgcgattcgcaatggcagaatcgcctgtcagggcaaaagagcacatcagcatatgagacactgtgaagtgaattgccgggtttgtgtaccgaccttgaccacgacgtatgctgctacagcgcttgcgatcccagccgccgctgtcgactgacgagcggctgccgcgacgagcagagcttcttcttcggacgatatgcggtcctcctcggccgtcgccttgctgcccttttcatacccgaatagaccatatcgtcgagccaccttgtcgacccttttctgaccctcttccagccagtcccggatgtacgcgcccaatcccaaatcgtcgccgtcttcctggcgagaggcccatttaatgatggacccaccgacctcgaacgcttggaaagcgaaaaacagggcgatcaggggaatgatggccgtcaactcgtgcaagatcgcaaatgagaccgccagagaaggaagagggagacctgatttggtggagatggcatccaggtgagggatgtacttggcaaatcgtgatttcgccgatgcagacgatgacgtcggctggttcgagaggaaacgtctcgatcgagctgttatccggaatggcggtgccgccggccagcggatggcccgacgaatgcccgtgctgaacatccttggagacaaaaaccaacgaatatgcggtggtgctgcgagaccgggaaaattgcggtgatgatagcagactataatcgtgagctgtactacttttcgaccgaggttgctgagatccggtcactttctaaaaagtggaggtcgccgacttttgttgttgacaagcaatttcgttaggaatcccccgattgtacacttacatacctttgctgcaactctcgatcctcttgaagcgattcccactcattgcttggcagctctacttatacacagggaggtctggaaaagtaaaaattgacatgccgatcgccgtaacgaaatcgactatgctgtcgactgaagagatcctgcgcacggctttagccgaacatgaccagcaggacaacggaactgtggattactcggaggtcattagcaaagccttcgttgctcttgactctcctgggaacgtaagtcgtgatggcagacgagtccattgttaccacgactgagatttcgccttctgaatagatcccttactaccgaccaggagcgaccgccccgttaactgtatgtcgatttcggtgcatgctacaggatacgggctaccccttggaggtatatatgccacctacggaggaagctggctcttctgagaatgtaggagacgatctttacggaaattctgtggattggtccaggctgaaggaacgatgggtcggctggggcgttgagtgagtgactaaccagccgatggatggtctgcatgccgacaagagcgtttgaaaacaggattccgggcgagcagccatggatgaaggcggaacttgagggatgtccgaatctcgaagccggcttcgagaacctttctgtcaatcctcattcatccagggcgttgccagctagtatgtacggcaagtttcccgaaagcaacaggaacggaaactacacaggagcccttttgaaggtcagtctcgctgcagatacaatttgtatcgttgctgatatgaccagcggattgataacaggtgtatgatgcggaggcatcatatcaaccagcgtcgacctacactttcacggggattctatcgacatcatcgctgcctgcgtccgatgaccaggacgaaatggacgagggtgccgcatccgaaccagtgccgacgctccacgtgcttggatcgccgcatcaggtttatcctcttcagtccgtatccatccagactgaagcggatgccgaccgagaagaggtcatcgagcagctttctcgggccttttgcacagaagatcgattatccgccgaattcctattgctcgccttgatctcttcggtaacaacccgggtaccgggaggcgtacctctcggttcactgtccatgaatttcatggtgcccaagggcgatcaggtagatcccggcgcgttcaagcgaatcgtagacacggtctcggccgtcaccccgcttgtctcgccgatcgaattgacgatcgacctcatctccaaaggatctttctatccattctctgtcgacgcagcgggttcgacaggactacaatcgggcgtgttacaacgggccccttcgaccgtcatacttctgaatgaagatagcctagagggaggagacctgaaggacagagctgtcaagaacctcaaggccttgatggacgtggtcaagacgcaaaaattgcggtacgagtttccgttcgtcggagaggactttggaatggaagtagatcttggtttcatcgtgatcggccaaggcaagagcttcctaccagtcagttatgaacgatgcttactgcacgcgcggcttctgctcacttctaaatccgcttcagatcgatttgcatgtacctactttgcccggccaacctgctagaggaatcgcttctctggatgaaagcaagctcaagtcgattaggcgctacgtttcggaagctcgggccgctgccagagcgttatctatccctgacgatgtagccgaacacatccagagtgagtttgtcaggatgaggaaagaagcctccgccgagggcaaggtgatcggcgaggaggaattgaagcgctggatgaagatcgcaaggtgatttcgcttcgacgtcaaatttcgaagaaattatgctgaacgaaacaccttcctccaggttattggccctgtcttaccctgagcgcgtattgagcaagaatgtttgggaaagggtgctgaccatggacaaagaaagactgaatcgattggacagtcgatgactgatcacgatagattcgtcgtttacgaccctttacgaataagagagtctggtatcttcatcgatcgttctgcattcttacacgaatgatggtattgtcgttacaaagggcaatcagttcgtaattctaattcatacagacaagccgtcctgcggcaattgttcaccgaatcggctcggcagtcaagagatctgtacatgacgatgaaatcgattcagttggtcgtcaaaaatatacgaatgtatcgtcacaatgtttaccgttagccgtggctttggcctcgcccgtcagccccttctcatcggtatcgttggctttcaagaaagcctccacctcgtccatgacaccctcctcgtcttcgcctcccggagcgtcctcgtcactatcaccaattgcgtcgatcgcaaagttaggcctgtgcaagatggcttcttgtgcagctcgcaacatgtcgttttcgtccttgcgcttcatgtccatggttgacgaagtcgacggtgctctcaaccttgaaggcatctgcgacgccgtactggtcaaggtggacgacgaggccgaggatggactgcgcattctctgtacttcttgttgagctggattgaggagagattctcgtgtctgaacgtccgatgtcacgtgtacaggatcgctcttgccgatcgctggtttccgccattctgcgtgccgaccgagggccgagccaagcccgtccgcgaagcggttgaacctcgacttgttttcgttggtgactaccatgttgaccaggcctccgataagcgtgtcagacttcgcttgagtaacgtgatattcgccaggtactgcatctaggcggaacgaggccgctagatcggaatcaaagaacccctctagcagttcgtcggccaaaatgaccatcctgaatgtcgcgaggtctgcaaccaccgggtaagcggccgtgctagataccctcatgcagcgagacacttactcaagtagggcgcattgtgaggtgagctgacactttcggcccgcttcctgttttgagtagcattctgatcatcacttgccatgggtacgagcaaatcggcctggtccggttgcaagctttcttcgggagccgtagcatcgccaaagtcgaacgcgttcaagatgaacttggagaccgcagccaggtaagcgtcaccgggttcgttcctgaagatgaactggggacaaaatacaatttcatagacaatgtcaatatgggtgtagcgcaggctcgggcttcaggagactcaccagaagagattctgagagctgaatgacttcgtcttttgtaaggaatccatctttgttcttgtcgtgctatagagaacgaactcatcagcagggcgtttttgcgaaccgatcggttttaccgttacgcaccaggtggaagaaccactctatcgattccatcagccctgcaaacatcactgtgtccagaccgacaacgacatcctgctcgaacaccgcaaacaatcagcacaacattggtagcagcaggagccaagccagactcacctgtaatgacaggtagccttggtgagtggtatcccaagagtagaacagtctctcgacgagttcgtgttcggctacttttcgttctgtccgattggtaaaggcgttttgaaagacgatttcatccctcgcccaagagcacacgtcgctcaagagcaacttgaaagtcttcaaatcgatccttgtctccaaccgccctgccgagtcttgtgcactcccaggtgtgacgagcggcaccgccttgggcgaaggattgccattcatgaccgatggcgaagagacggcggcgaaaaacttgtcatagatcgtcgtgacttgatctttggagaatcgaccggtaaacttgaggttccgtacggctgcccgtttggaaaacatttcaatctcgtcggcaatgatcgctcggaatcgccttcgttcagactgaatggtctcttcggtgatgacgttgaactcgcgaaaagcgacgaccaagagttcctgaaaattggtgatcgctcgtacccgaggatctgaatgatcgggatgcgccgactcgcccagggttccaaagtaagttcgcatcaggttgataaacatgccatcgtctgtaatctccaagagctcttccccattgattttgagtacggctgcaggacggatcgacgtttggtcagtttgaggatgcgacgtgcgtatcctggcgaaatcgcggtccccaactcctcacctagaccgatctggaagatgactttgacgcccatggccatgacgcagtcgacgactcggaaagcaaagatcaagggcatcgagttgatgtacaagctcaggaaccatctgcaagatgacaatcagcgccgtgccacaaagggcaacatgtggacctggaagcgtgctcacgggagggaggccaccgaaatctgcacgtcgacgctcttgaaatgttgatgaatcatcggcaaacatcgaccgaccaatgcctcgaacacgcgttgatccagtaatgtcccttccatcgaaggactaccggatggcgcttgcgttagaatgagggcactgctgggcaatgaaagtgcacgaaacggtgacttgcgtataatagcctggcactatccggtcacacaaaacttcgagcagccagaacgcttgttcttcggacatgtagctgtggtaaaagaccaacaattggcaatgatcagtcgtgaaccacgattggcctccgcgccacctcattcagggccttacatcaacaacctggagcggagcgaaaacaagtcgagagacgggcctgatcagcgttgcgtttcatttggatttccgatccctcgccacgctgtggacctaccctgcgacgacgatattgagcgcttgacaataccccaactctggatttcggaaactatacgcgacgaggaccctcctgagcttgttgagcccctcttcagactggtaggccttgtattccggtagagaccggttgaggtccttttcaatctcgtccgtggccgaggtcgtccgatcggcgttctccgccaagagtcgcgagtaggtcgatcggttcgcgtatcggagatctatgacgaagggtcacaaagtggggtcatgatcaggatatggaacgggtcagtgtcggtagcacgccttgacttgcataatgacccgctgagcgtctcccatagctctccccgtagtctggatgggagaccgacctggaggagtcgttgaaacggcgggtagcgcaggactgcgagatgatgccgcacaaaggtgagtcgacgatttggcactctcgagaaagagagacaggcagagaaagagagtctctacgccttttgacgtcgacctgaacgtacgtgtcaaattcctcccgtgggttacgaaatactctctccacaacttgatcttgctcctctctctcaactttctcgcgtctcccgggtagccaaacgtctcgcctagacctcgctcgtaggcgcccttgccatccccacctggacctcgagcgtccgctgcaggagcgttcgaattcgagcccgaagtgccaccaccggcaccccgagattccttcccacccgtccccaagtccgagcctagcccgatcaagtcgaccttgtccgcctccaatcccggggtggaaaccgcccctcctggaccggacccctggagcggatgatgattgtgcaggaacgccggttgtgtgagcaggtactcggagtagagggtcgggaggaacggtttgaggagtttcatctcggccagttgagccttgagggcgtcccggaggaggatgctaaagtgttccgcggtcgggaggagggatgtgagttgcaggatctgcgagaagaccgtaagaagggggtgggagggggtccgtcagccaggctgttgaatgcctaccctggtcgacagggctagacgagatgaccgtgagcgctcacgatccgtagtccgtgccacgtcgctagactcagcgcgaacacgcctgcccgggaattcaacctgtttcagaacgggcgatccgtcgtcggtatcagctcctgcaaaggtcgtcaccggaggatggcccggtgtgtatgtgggcgaaggcgcgggacgtaccgttcgacccggcggatggtatacaggggaagagagaaccgagcggaacgcttgtccagcgacatgaagcataagaaggggggtaggagatgtagcttgcccgactgtcgaagtccggagttcgaggtcgaggttcgagatcgaagacgaagccatcgtcagcgtcgactttagtctcgatctcagaccgacgtatctaggcaagagcatgcctctgcgcccgaagatgaaaggaccgatgcacactcacgtaaacctcgtccttgccctcgacgctcaagatggcgctgatctccatacccatcgtaccgttcatcatgcccactccgcccgattcgatcttctccttcatggcctgttcatgccgaggatccttgaccaatttcgggtcggtcgctgggtcgtaagagggggaagcctgtggcatgacccatagcaagggagggacgttgaagaggagacgggtgaggtcgtcccgagtaggctcctggtaagctcggaggtggagcggcagcgacatggctgctgcggggaagactggtcgggggtgacgatggtgggggctgtcgggcggctttacttggtcgttgtatctagggcagtatggcaggcagaggtgattggtgtgtatgtgtgtgattgttgctacgcagtgatggtaggatgattgctgctacggagttgctaagagagtcgaggtggtcaagtgaggtgaggttagcagggcagcctagatagcaggggtgatcaacgtaataataacgtaaagatgacgtaatggatgtcggccgaaaccgatgactcatcatcatgcaatggatccaagagtacctactagctactaggttgcagcatcaaattgggtgatcgacgagatagacaccatcatcgtgtacctcccccatcttccatctcgccgatctctacttgtcgacctcgacagcaagctaaagcgaaacatgtcggaatcattcaggtcctacgtccaccctctcgagatccctcgacctgaagccacgatacaagagctactcgacacgcatgccggcgaagaatggatctggggtcagcctggcgtaggcctgtatgaagggtgagcagttcagtctagacgaaaaggacgacgcgtacagtgcgtaagacattcgaaccggagctgaatggatgaggacgacctcctccccttctctgggcagcaactcgaaattaccggatcatcaggtcctctcggtacaactgaccacccatcgactcctcttcctcgctaccgctaccatgacgacgtccactactacgactccgaccttgacccccctgagcccgaacttgcaagtctccctggcagatatcaggcagaccgagtattacatgggtttcatgcggtccagcgccaagatcaccttgttccttggagagaacccggacctctggaccgaccccgttggagctggagctggagcagcagggtcggcttcgtcgtcgtcgtcaagtccgtactcgaatggcaacgggaacagtagtggcgggcaagacgctggggtttgggattgcaacgtctgtgggtttaccaacccgacgacgacggtgaatagaacaccggggagcaagaccccgcggtgtgctctatgtggagtgatcaaggatctcgtacccgcttcttcccgtccatccacaccggcaaccggtccgggctcaatcccgatcaccaaggagaccaaccctgtctcatcgtcgacgccgccgacgaccacggccgtgcactcgccctccccccgcttggtcaaccacccggaaaacaatatcggcggagaagggttcgagatcccctgcccacggtgcacgttcctgaaccgaccagacttgaaacgatgtgaagtctgcgccggggtcttggtccctcatggaagtagcgccccagccgccatcgccaatatcgtggacccgagacgctccctcacgtcggccacgtccaatgggaacgcgggaatcgactcgcccgcccctcgtctacccttacccccggcgaaccctccgtcgtcgtcatcggcggggcataacgggagtatggccaccttgaggatctcgttcaggagaggaggggaaaaggaagcttacaagcggttacgcgcagtattgagcgccaaggcgtgggaaagagatcgaacggatcgaggaggtggagcgcgggagggaggtgtgaacggaaacctagccggggctgggggtgtcaggtctggattcgggataggtgagactgcacacattgccaggttcgtatggcacatgtacggcccgagctgacgaccatcttccgggggcgacacctgtctcgtgggcaacagacgggatcttgcaaaacatctcgcttgagaacaaggctcaacagggcgacgtcgagaacgccttcaaagacctcgaggccctcatgatccgggcaggggacatggtcaagctcgtccagacgctcaattccaaattgacgcagcagcagaatcaacgatcacctacgaacggtccaggaggtccggggcaagaggacaacgagacccagacgtttcttcgatcttccttagtccagctcggattacccgcaccggccatcacgcccgacatggtcgccgacgagcggaaatacctcgaagggctagccaacgagttgggcgggttgttgaccggcaagacggggggtagggaggacgacgggttgatggtcggcaggcacggtaaaggattggtcgggatggaccaggtctgggggttgtggaatcgcgcgcgcggcgtctgtgagtggctcatcctcggaggttgccgctgttgggccagcgcgaaactcaccgaaggtcgtccccgacagccttggtctcaccctcggactttcagaagaccatccccttgctacagaattacacccgtccgagggtcgaaatgatgacctttcccacaggactctcggtcttgcacaccccgttctaccatccgaaaatctttagtcaccgattattcgggcaactctcaccgaccgagtcggacgaggtcgaaagggcattgtcgacggtggagatcgcccttgccgaaggtctctcggtcggactcgccaaagagatggtctacctcgtcgaaacgcaatatggtcagatcgtcagggacgaacaggcgcaggaacaaggtggaggagagcggtggtataggaatctcatcctagacaccaaagcggatgacatttaggctccacgcctgacgccgctctccaagtagtacaggttgtatcacgatgcagcatcgtcaatcatgggtcaatatacgtgtataccccgatccgcctttcatcacgtcgtcggcgctgtcgtgaccacatcatccgacatgtcactgcgcatactgccggtgtctccgatctcgcttgccccgtcatccaatagcccgccccctttatccccgccagtgtcctcgtcaccagtctcacatccggtcgtactgaccatgtccgcatcatcgaggttcggtagggcgggtccaggcttttctcccgcatcgacggggattagcggcacgatcggggcgatgcccggcgtagggggtgctgctccgatcacagacgacgatggtgtcgagactggagtcgccacgccgctacccccaccagacgctgccgggttagatgatgtcgtaaccgttgtagggtcgacgctttcgcttataggcgctaccaacgggatccgagttaccgccaacctttgtctgacttggaattcgctcaacctcctctttccatgttgatttgccaagtatttcagttgggcgatctgatcctcccgaaggtattgtgcgataggcacatcaataccatcatggacatcacctctgtctgtatgatagatcctgaccggtgcatcggtcttggctcgaccgaacgcggtgcgtcgtcctagtctcaaatactgccctaatccagtatctatcacggaccctgagctaatctcgtcgggaatggattcggtcattgtcaaagctcccgttgatacgatggtaggtactgtgatcgatggaaggatcaaggatgaagtgctagcgacttcgagttccgcgctttctgcctcggacacgatggccttttgcacagcgctatggtaggtactgaaaacttctctgtaatcgttgcacaatgacaagcgctggtcatgcatccaatcggccatcctcagatcacgtctcgcacgtcgatggatttcgccaactctgcgtttgcgagtgtcggaggaaatttccggcttgttgctcgacttcaagctattctcgcgaacgaccggtcggagcactgcatcgccatgtacagtgtccagccaagagtcaattctggctttagatttcccgctctcgcttgtactggctttggtctctttcgcagcgaggtcaagctccgctagccccttctccagtctttctctttcggcctgttgcttcgccacaatgtcctcttgttcactctggatcgcatggtcgcgcaaaaattgtcctttcgccaacgatggcagtgctgggttaccgtcgctgctcgacttttgcaataacgatattttctctgcagcgtccttcttggccttttccgccaacagaattcgataccattcttcgcttgtggtctgtttgatacgatcgcggaaatcatccaggatctttttctgttcaggcgacaagtcctcaagtttggtcggcccggtcaacttgtcgctgcctggcggtctgagcgcttcaaaatcatcttcgtcaggcgttttggttactacagacggagaagatttcggagcctgtgccgttatcggtgttcttcttgaaggggtcgattcgggttccggcaaaggtgacacttccgccttgctcggggcatcagccttgttacccaatgtgctcatcccggcgaatttggcagacatcgtgccacagaccactcgcgtactgatcgaaatctttagtaatacacgagatgtgtaaaatcggaagggtatctacccggcttcatagcttataacctgtgcctgccgtggcgcgaagaaaggaaggagagccaagttgatcatcgtgaaacgtatcgcattgcaacgttgtgtaatagaggagctaggatgtcacgtgatccggctcaatcgcctccgtaccgatttacctccgggcattcaagctcgcaatctcctcggaatgtctcgtagcctacatacataagagtgcactccagtgcaccttgttggactgtggaagaaacagtaatagcaggccagtctcgaggatcagcttcgattctttcgttcgagttcgcgagcctgagacgcaagtctgttgctggacaacgatccgtttatctggcgcgacgggataccatcatgtcgtcgtattcagaatcgtcgagttacggagcacgccgatccttcgacattccacacgagggacaccttcaccgatctggttcttcaacaacagtgcacgacagtccctctagaaaatacggaggagtcatcggtcaattggcgacctatggaacacttaatggaccaaggatcaagcactcgctggattccgatttgaacctggcagcgtaagctcgacctgtccgaaccctaccaaggtttgtgtttgaccatcgcttgtctttaggcttgtcgatggggaaagactcggcgaccaatttgaaaacctgccagtagaggaagaacagatcaagaaatgtgcaaaaaaggtaggacccgagctcgagccggcctgcgacctgatcgatgcttataagcagatccaccctggttttaaactggcagttgagaccttattacgaaaacatgtcgcggatacgagatcactatcaagaagtcgacgagctgttagcgtctgcgcttccatccactatcgcagaggcatttcgacagaatcaaatcacgctgcaagcggcagacgaggaggatttcagtttcccacaaaggggtcgtggaaacggctcaaaaactccgcccatcataatcgtgcaaaaatcatcagagtcggtctcggaatcaaatacgaaacgacgccaaagccgagatcggagtcgtagtcgcgccagatcagagcaggtgatgtcggtggacctagcagaggacgagcctctacttcccgcatcacaagagcgtgaagagaagcgagagaaacgaaatgccctagcgctcaacggtaagaactcctcttggccacccaggaattcaatattctgatcctgttcttgcagtcaatttcggtgtcaatattgttctactcctcgccaagggcttcgccgttctctcttcctcctctgtatccctggtcgcttcgtttgtcgatgcgttcctcgactttatctcgacgttgataatattcatctcgagcgtcgccatgggacacaagggcgatcgacacaagtaccctgccgggaagaagaggttcgagcctctaggcgtcctgatcttcagcgtgaccatgattgcctcctttgtgcaagtgagtgcagatggtttggcgactgtgttgacccccgttaaatccctctgcatggcaggtctttatcgagtctttccaaagggtattggcagcacggaagggagacgtcgaagtggcagaactcagctggcttggtatagggtgagtaatgcatatctcgagcccatcacggggaccaacggtcagcacttctccagcacgatgatcgcgacaatcattatcaaaggcatcatgtgggtcttgatcacgataaagtaactcttctaatgtcaatagctgatctcatccatacatccagctggttctggtgctcgagcatgccctcgaccgctattagagcgctagcacaggatgccgagaatgatggtgagtgcaatattttacctatgaggcctatgagggttctgaggttgaggtccgactcgatcagtcttcttcaacatcatgtctttggggttcccatggcttggcggtcttctcaagtggaacctcctggatccgattggaggaatggtgctctcatcctatatcatctggcaatggtgtctcacgctccatgagaactttacgaaccgtatgtgatcgaaagagcgtgaacgtgcggatgggatatctaacattgcctggaactgtcatagtctcgggcaaggctgcagacgggggtgaagtcactaggatcctctacctcgtttctcgcttcaagcccgtcctgcagatctcttattgtgaaatctaccacatcggggacgagctgatcgcagaaattgacgtgatcttgccgcaatcgtccactttgcattatgcgcatgacgccacggagactttgcagtaggtgcaatcccagacaaacctatttcgtgtctgacgagaacacgcgctttctaggggtctcatcgagagtctggaaggagtcgcacgcgcgtatgttcacgcggactactccagcgagaatccgtaagtctagcacgagcccccaagctagagattcactgatcatcgatccattgatgggccttcagagctcaacacaaagtcgcgggtagcgaggtgaagaaagcgaagccggaaagcggactgcgccgaatgtcgaccgttgaggaaacgaggtagaattacgattgtagacatcgacggtcgttcactttagtacagatcaaacgcttatcatttcgctggattcaattttgagaagcctactgcgcatgtaaaccagggttcacgtgcgagtacaaacgaatcgttttcgtgaggtgatccgacgtttctcagagcttttcgggctcgctcgatcgatcggtccatcttgcttgttagcgcgagcagctcgagccacccagcttcgagcgagccggatgaccaaagatcagggcgactcgaagtgctcttcggaaaggccgagcgttgcgatatcgtttgacatttcgagtaaacatctggatagcacctggggtcactggaagagctattaacgatatggtatgtctgcgggccagccaaaccggagcttacaacgcagcttatgacacggatgttaagcagccacctaagacaagacaggctacgggcagccttcccgcagtgacactgaagagaaaagctgaggacgaccttgtggacgatgaagatgtcgacccagacttccgagccctctctagcaagcaaaggaggacgatcgacgacgcctacgagcaggcaacagggtctagcaagaggagaaagacaggggatgggtacggtggaggtggatttgtcactgatgacagcgttgcaggagggtttctaccagacgatggcgaaatgggaggcggcggtttcgtggacgacatgatgatgggaggaggtttcatgacggaaaatgccgacgagccgatcgcccagccgacctcgcacctatacgatcagccggaagtcgacgggatcaccatgtccgccatgcccgaggtcatgaactcgctacaactcgtttgggacgaagacgttttggctgctttcgagggagtctgcacgcagacgactcctagtggagaagcgtatgcgactcgacaggatttccgagccgtctgcgctgccctgatggaacccgaagaggaagaagcagacgccaggatgagcgaggacgaggatgacgaagaggatgcatatgctgaaggcaatgtagaggatgcagaaatggcggacagcgacgcatcatctcccctatccgaagtcgacggcgaatttgaaacacttatcagtaaaggcaaaggcaaagccaaggccggagggaaggggaagaaggggaaaagcggcaaccaggatctgcgaatggaccctgcagcggcgcaagtcaagctatccagggagcaaaaggattggatcaccatgatgtggaacacaatgttcgagaacactcagccgtcaattatcgctcagcatggaccgcgtgtgcttggcaaagagcaggttcgacgttgggccgagatgatggatcagacgtggaacgatgcagaggtaagcaaacaagctcaaatcgtagagacggtcgggaaagtagcttaccgttgtcgcattgattacagctcactgagatgatcgaagttttctcgaccgtaccggggaaacgtggattgagttacgacgacttcacgactgtcctgatcagggccggtctggtacagttctgagcggggactagtcctgtattacaaccccacgagacgactacaccgagtacaagcctcgcatgagatagttgaccacaaagttgtcgactacgcatcaaccccgctcatcacaaaggccgagctgcaggaaggtgccggcaatcacccacgattcagcgggtcgacgtcccggtcaggccgtcctcccgacctggcatacaccctcttctgatggacgccctctcgggcgaaggaaaccatagttgaggtttcatcagagagacacaaagaagcgatctgtctagcgtgggcttcgctcatcttatcacattattgtatccaaagctactgttcattttacagtcatgtatcgttgccgtcattatcatgtcgtgacgtctatagtctctacttgtaggaatctcagttggggtcttgcaagactacgaggagatatttctcgtctgacaagatgcggagaaattttggtggccgatcagcgacccttgatgctagcgggatatggaatggccatggcgacttacccggagatataatcaattcatgcttcttggttctcatgcgcaagaatttaagggagtcctgatcggaatggatcaaacaataagcagccggaaactctgctttgcaggagttctcactaaccccttcttccagctcctcgatgcccttaatgacgctctcgatcatcttgacaactaccctcgcatacgtcttgcccttctcgccttcgaaagccgtgccgctttggcgaagaactcctcctagccgtgtcatgaccattatccccatgacattcttgtatcccgagagacgagatagagtcgcctcgatctcgctcgatgcgctcgaacccgttgcttcggactgcttaatagcaacgtggaaggacgtcgttcagtatccctaagaatgagacaaatcaattcgaaggactcgccataatccagcctgacgacgagaagatagagaggagaatttcaaaggcgttacggtcccagcacccagcaattctaaggctaccaagtcgattgaacgagcaaacctggtgagctgatgacgaagatatgggatgtttggctcgagaggacgtccaagcaagatctacggtcaagtccgggtgcgcgattctccagccttggtcctcctgatctccatctgccacacctgtatcacactacagatctgcatgatcatttcaattctggagtgacggcggctacagtcttctgtcaacgatatggagcggataaatcttctcgccatcatcttggtcacctcgacggtgagcggaggttccaacttggtctttcgctaccccccgaatcctcgacctgccgagcgactgtcgaggcctgtctatggcaagaagggcacacaggatgggggtttctccactgctccaagatccaataggtctacaggtgcgactggtcttgaaacggggctatcgcaggaggctgaatggctctataggagagagctaggtgaagcctacgatagcgatgacagtttggacgaccagctggaaagcgctctatggcaaccgctgcacgtcacgggcggagaagtggaacccgtcagacagaggagacctgcacccagacgaccaggaaggtctgatccggaacttggatcgtcgtccaaaccggatcctctagctgctggtgcgacgtcacaggtgactcagacagagagcagcgccagcggaggttcgacatacagcgcctcggactgggagaacatacttggttacgatagagatttcttgaactctctattgacaccatcaagatcatcatgcaataagcggttcgaactcgtaatcgatgatatagcattcatcggccacccggtgtgcgcggacgagaatggcaagtggtcattgccatacgaggaggaagaggcggaaaaagaaccagagcgaggacgcggtcgagaaatcgagcgtccaggctctcgaaatatgagaagattcggccagacgccccaagagttgactccggttaccgaaggggtgccctcggactcggtctcagagcgatctatcgcgacgacatataaatctgacgaggaggacgaccccaaacaggctggaaaggatgaagtgaagaaatactctcagctatctttcttccaccttgtcctggcactcgacaagcccgacccacaactagactttgatatgccgggggtgatctacgaactgctttatcgcgaggttgcatttaaatggacggctgcggcctttgcggagcaagtcagggccgactgggtcgggcaagaatgcctcaagctgagcaagatacgcgagcattgtatacaacagcgtgagtccataacactgatcacatgggtctgttgagcacgctcctaatcaatcagacctcatagtcattccgctcaaaaaggcacaagcagaggcgtttggagcctccccgcttgcgaagaatctgcgcgaactttacgatggtatccgagcaatggcgcctatacaattaactgtgggggacatcccgatcgacgttgctatgccggtcagccagcctcgagtggcggaagagtggacacgctgggatgatgccgatgatgcaccgtccgaagcgtcatccttagacacggacatttatctacaggagagcgatgatgcagaatccaatcttggtgaagacgaggaagaggtgatcgttcggccgacgctcaaggcagatcctgctttcgatttcaagccttggaagacgctgcttcctctcgatatgatacacaacttgagagaggctccagcggacctcgacgaggaagcgcttcaacggtaccagcaaatcagtgagaacccggccgaagtgtccgagttcgtgagccggttccttcagagtctcgatccaacgataccgtgagtctcgaccggtgaaaagcaagtgatgtcatagctcatgctatcgatgttcagcctttatgagattgctgcctacctggagatggacctgatttctgaagtataccctctagctcgatacctcattcatatccgcaaagtcaagctcattgatgtggtgcggaagagtcttcgtaatgtctttatgccggaatcaacgatcggaaaatcgtgagtgattgagtgagaaaccgagacctcgatctgtcgggctgagcagtcatgttccgcagcatccctatcatctgcgcggaatgggcgaaagagtttcccactttaccttcttggcccacattcattggccgaatctcagcctcgccgcaaccttatcgcaagctcataccgcaaattgacggagagatcaggctggcggatcgagaagaatatacgagggctctgtactggttgatctcgcacggactcgtcatacaggctcatgatcatgtcaagatcgtggcgactaaggagacaaaggagaaggccagccgcgagctggaggaagaacggaaagcgagatctatttcacgagacctcaggcgcacgagacgggcctcgctgcccgaaagtctgttcaacgaccgcacccgatttgatgcggagatcgcttctcgagacgagacatcctcgactgatagcggagagatttcggaagaggactttgacgaaaacgagcttagagaggatttcttgaacgacggtcaggaatcgtttatacatcgtcccagcaagccgtcttctgccgaagaccgatgtttgcggatcattatgcgtgacaaggacacggaatggcaaagaagatttgcacagtgagtcatggacatgtagctatcaacgggatttgggcgatattctgaccgttgatcaaacattaggtgcttgacatgtttcgatggcaagatgacgctggacgccgtccagtatgaaacgggcttgcggcgaaaccatctgcgcgatctgttggcgattttcaaggaagacgtgagtgaccaatctcgtgcatgcatacttccgtagcataggctcatccagtctccatgccagttggtcgtctttcttcatccatgaccacttagtgacctgataaaccaggccaacattgctttcgtatcataatgttgtatggagagatttgtgcgtattgtattgttgcgatcaaacgctagctttgagttacatcgctctgctgtggggcgtttgccttatcatcaccgtaacctagttgttctctccaccatctccagtcattccaaactccactccgcttgtgaaccatcatcaatcctagctgagccggtagccaccacaagctgacgaagaagagcttccgcgccgtcttttcgttccggaatcgcatgaaattgacggcgcgatacgtaaagaccagattggcgggtaatgaagttgccaggaacgcccacgtcaccgcaccagtaactggaggtaataccgagcagatggggaacagcaagagtaaggtatgtcgcagggataccaatgcattcttgcgtgggtcgatggcgctcaacatgcggtaaccgcccaatgcgtaggatttccggataagatgtgagagcgagttgaagtgtggaaattgccacgagaataggaagaggaacagcatgtatgccgtcaagggatttggtgtcgtgaggagggtagatccagtggcatcagagctgacagctctgatcttgtccgtaccgttagtccgcttgtctgtgaacccggactccaggacgtaggcgtcttggggatagacccagtagccatcctcattggggcgcgaatcgttttgccatcccatcatcgatccaaaccaggcaggccaccagatttgcataggcatctccctcgaaaagccaagaccggcaccagtagctgcccaacccatcaacggtggcaaccccccaacgattgaccctacccacgtgttcaggatggtgaatcgcttcaggggtgtgtagatggccgagtacaagaccagattgcctactcctaaagcagctgtggtaccattgcaaccgaagtagagcacggtcgtcccgatgacagtacacgagacggcgaacagaaaggcgtgcactggcgagatggctcggactacgagtggtcgattccgcgtcctgggagtctgagcatccatgggtgattccaatagctgattgaaggtgttggcagcggcactgacaaggtacgtccccgttgtcagggacaagagcaatggtaccgacagagggagtggggatagtgctagacctgttgtgccggtgagggtcactaacacggacaagttgtgctttgccaattgcttgtatattgcgatgagacgccgcggtgtcagctttgcgaccggcttatagagtgaccgatctgctgtatgatatggcggaggcgggggtatggataaactagccatgccaggcagatgctccagtgtcgatctcggcggtctgaccgcagctcggaatcccatctcgtccacagcggctgtctcgacaggggtatccaaagctctgcctttccctttccatttcgttgatacgcctggtagtatgctacctgatgtcgtaccgtccgttggctccgtcaaccgagtagtgtgagaggtgaagtaagtgagaggcagagccgatgtagaagttgagtgatttcgcagagcccgagggttcaaccggtttcgacatcgaaatgaagtccgaaagcacacatgcgtcgttataaggcgtattgatgtagatgtagggccgaggcagctgcggtcaacaaggttggtcagatagccatcccgatgtccgagtatttagatgtcgactaacctcatgattggcatccgtttatggtccaagagatttagctcgttgaattatttgtgataccgcctcgtccaccgctcaagctcttaagcaattgaggagggctgctattccaatttaacaagggtaaggttcaggatgctccattggtgaattcgagatgatgtaacaagtcgatatcaattaacgattcgctccgatctgaacgtcgggtcccgattttaggacatcgggataactattttttgtttatttccacctcgcgagttgttgtttcagttgccgttgttactaagtgctcatcatgtatctgtacaaaatcgcgaatacctttatctatcatcggtcacaaggcagattacatgccgttgtaatgctacagctgttcgaaagtcatatcacatgtcatgcgccgctaaatcaatcttttaggcgattcagatatgcccacgcgactacgcctacgacagccacagatacggccacgggcacgagctaagaagaaatgttcggtcagtgtcggctctggcacggtcgtgttcatcaagaagcgactgaggacttactcgagtggctgcaataccgttcggtgactctccagcgttcgtgcgtgcttcggcgaccttgaccttgtgtttgtccttgtcggatctctcggattccgacttaggcccttcgtgagcagtttcgtcgctttccgtgcaggtactctcgccgtgcgaagtagtacgcgaatcatcatccccatcaatgtcgactcccaacgtggaagccgcaggagccgcgtcaggggcggctaagctcgcttttctcgtggaacccttctccataccgctcgacttgcggcgcgattctcctcgcttgcgtccagtgatggttcccgcacgtcgattacgagctgctttggctctcagagcgtctaacgctccttctgccgctgaagagctacccgttcgaggagttgatgtgccattgcctttcggcccatttggaccgcgagtcgcgggctcgcctgcagcggctttcaatgctcggatggcggggtccaatcgacttgacgattctcttcgaatacgaacttgctcctgcttgaaagacgaggatcggggagagacagagtggctacgatccgggatcctcataagcatcgactcgtccttgcctcgatcaagacctgaaccgatccagtcgtcgtctgaacccttgcccgagaggtcgttctcttcttcctccccagaatcgtcgtctgtaccagactcgccactaagccgagcgttcattagacgctcttcctcctcttcctgtgcccttcggctggcttcttcccattcgcggaccaccccacgcaatcgctcgcgttccagctcgtagccctcacgctcctttctccatccttcttcaaacttgcttctccaggtctcccatcggtcttcggcggatcggcccgcctgtccagctgcttcggttacgcgcgtagccatgtcccgttcaagagctacgatcttgtcctcgagagccttgacggtggacgaagcttcgtcgtgctgctgctgtaggttgcgcgacagtttgagcgcctgctcgaggtcggctgagagggtacgagagagctcgagggcctgttcaagatcttccgacaatgaatcgattctggaagcaagcatgttgttgcgagcgacaacttcctccctccatgtcttttccttggaatcgcctgacgacagagattggtttgaggacgagcgattcatgaacgaggaacggcgacttgaaggtgacgcagcatctccattgtgatcagaacctctcgaatggtgtccctgcttgctatcctgaccgtcactgttgtgatcgtcttcgtcctcttctcgggagcgagactgagcctggttttgcagaatagtctcaaactccaatttgctcgcttccatttgctgacgaaggctcaagacctcggttttaatagcttcatggtcggtgaggagcgtctccaaagatcggatcctatccttgtggctgaccaatatcgattgcgtgctgctgagctgagcttgtaatgctgcgatggtagcggtcggatcgccaactacgtgatcgggaacaccaggcacatagacaggtttgggctcatggggctggaactgaggcggaatatgcttagtagcatgtccgttctcgttcggtggctgagtcaaggggcggttagcatatctagctcaatctgtagactcttacgggacccctcacgagtcctccgcttagcgtatcctggatatcggtcatggctgatgtcaagttttgcaattcagcaccagtttctttgctcttctcgagttccgcctatatatgatattataaatgtcaatcagtgtcgccaagcaaaaggtgcaaatgccccagataagtacctgtaatttcgccagcacgtgatcgaagttcagcccgattccctttccaccagcgctcatcatgcccatgggtagtgagccattcataggaggggcagctccagttcccttgcgagtaggtccgattgccttggcttgatcgtaagggaagtagttggcgagttcgctgtaaaagtgagagtataagcagccgtgcgatgaggcttcccgcgcgaaaccgctaagcgaactcaccgcgcactcaatccagcatcatctacattccatacgacgtaggctttggcggacaccttgtagtgctgtactgttttattgtcttcactgacaatatcgataccgaactcctgcaaatccacaaacgatgagcagtctgcactctcctcgtcgaaagtgccaaagctacgacatacaacgatgtcctcgctctttaactcgtaaggttcgctctccatgccctcgttactcagacgatcgttgttgacgaaagttccgttagaagacttgacatcccggatatacatctgaaccagcggactgtgagctcagctgccgcctgcgaatcgcgcaaatgatcctgtgcttactcgagccgaaccgtcggcgctctgttcggaccaaacctcagcgtgcattcggctcaagaccttggagtcaaagaacccgttcctttctgtcggggtgctcttgatgttcgtctgacggccaatcttgacctggaggatgcaaacgtcgaaggaaaagcgagtgacgagtcacaaggtagccaggacagaaccgcgatgttcaagtaagagagcaagaagtgaaatatgtcggtcagcggacgcatttatatgcaaggcatatcaccgagtatccccctgtttcgcacggcgtactgccacatactcggaagggaatcaaggaaagagagacaatccacacttaccctttcagccggattcctgcccgtaattggtggtaggtggatcatcttggtcgtaaaagtctcgttcaaaggccacaggtgcaacgatgggaatggtcctccccaagggatctcttccccttgacttccctggtcatatccaccgggcgaatctgtccgccggggtcgctcagtgtagctattgttgccattgttgctactggtattcggcatcaaagggttgttgcgttgacctgatggaggagcgggacggaatggcgatggagatgactgtgcctgcgatgcgtaactcggtacggggcgagcgtctctttcccgtctgatgctgtttccagcttcgcccatctccatcggccggccacctagacctcgaccgttgatactgttgttgccattcatctcggaatgacgaccggcactggcattatgatggctgtcttccccggcatgaccgtaatcgccagggtagcccccgttgttgctggaagaatttcggatcgtgccggtgctagtgttggagagggtacgttcgagacccataccgctttgtggcatgatcgatacggtacgccttcaagggatctaggggttcggggaggagaggtaggttgggctgtcgagcgaaacctgtggccgagatgggatttgacaaccacccagaagaagggcgatagctgggatgtgtgtttcgttgattactgaggtcgtggtttcgtcgctggatctgatcagttgccggttgacatcgctatcttcctttgatttcgtgtagattgcggtagttgcagcggcttgatgacaaggtcgttgggaatgtcgatcggttttattgtgtcttgtggtatgttggacgcgcactggtggccagtatctggtcaaggacctagtgcagctcgtattcagtatctaatcagtaccggtaaaatcttgatgggtgatggcagacgacaatcaggagatccagttgcaagttgaaaatcatgagcctcctagcccttagccgtgatgtcaggacctagctagctagctagttgctagttggaggtttggattcgtgtaaggcacgcgcgtgatctcacacaaccacttggacatccggagcaaccagactcgattggcgaccgagctaccagctacatcaactctcccattctccgctcaagctgatgctgaggctggagttatttcagatatggatagatacacgttgattttcggtgcttgcttcatatggctctacaacaggggtgtaacacgacggggaacgggtagagatacagaggccatagactgtactaagctgtaacagtggtgtagtactggctcgtacatcaagtaagatccgagatacgtaaccgggaagttgctcaacgaagcctcttgaacgatgaggagcgctagaaccatcgataggcgagcaaatgatcaggttccagaggccagagaccgtctcgatttgcggacagaacttacgcctaagaaaacaacgacaaagtcgaacgtatactccccgacctcgaggtaattttgtatgagttctatcggggttacataaggtcagtgtagagttttgtgttgcgcaagcgtggtgcaggaggaacggttgcagacgagcagaagatgaagggggagacgcaacggcaaggtcagcgatatttcgcatgtctcaccagataacgtcataatacgcacttcgaaattccttgttcggtacctgctccaatgcgacactgcaaatatatttcaagccagatgcttgatcagatttcacttcgacttgggtgcgcacagcgtgtgcgacgacaccaccacctgccgacgtacgtgagaccggtattccgtttgatcccagctagtaacgccgtgatgagaacagcatcgaagccgaagtggaacagcttgccaaacagcgtcattttgctcgatgacgagctagtctgtacgaattgacctatcgatcttgcttaggtcccccaacgatatcttgtggctcaactcgattcggtcaggcgaaagcgatgatgcatcaccgagccgggtcggccgacgtcttgtctttcacgtgatcgaccatgtcacctcgggacctctaatgcgagctacttcgataatgacctatccgccaacatttcgtcaagattgtagaatctactacgcgatctggtaagctcgcgtgaacgcttaaatctcgctcgagataaaaaacagtacagtacagatatgtatggactgtcccgacgatagcacgactcctacttgaccgacggcagctctcgccgatatgctactcggacgagccttcgcctcgagcggcggacccacgaggacactgagtatcatggctcggttccctcgggctcgaggtagagaacgatctgaaacctcgagcgatgtctcgtggttgctcgcgaacccactcagagcgtattcagtggctctagccacggagaatgagcttgatcacgctgagccgggattcgcagaagagcggaacgagtcaacgcaacgcttatcggaggcgcatagcaatgtttccaccaggaatgacaggttctccagccagcaggaacctcgagctcttgagcatgttcaaggcggcgagggttctctctccggcaaagcgttcaagcatatcgaggatgccgagtctaaacccggaccagctgccttacaagccgatgcgttctttgctggtctgactactaaaggcaaaccgaaggagcgtactcacaagagcttgctgatgacacaacacaaactggagcgccgccgactgcgagaggctcagagagctctatctccagctcaacgttctttgagataccgctctgtcttggccgaggatatcagggacgccgagaggcgcttctcgcaattcacaaaaggcttggacgaagagatattggcatgggacagcagggtcgacaagctacaagaagaggcgaaggggccggcagcgatagacgattggacacgcaagaatccgcatccaagagttgtgcacgccgatactctacgtgcgcatctcaaccatcttctttacctgtcggcgcgagcgggatttacatcagactacaacatgttctccgacctcttcgagcgatatgacctcgaactggatagccgaacgcacctgacacgattgatcatgctggatcgcaagccgcaagttagcctggcgaggatgacgcggatatggaaagactggaagcgaagctcagaccttgtcgtatcgcctacgataggcaagctctcggaagctgccagggctgcagatgagacggtgctggcgaatcagacgatttggatgctggctaaacgaggacattggcggatcgtgggtgccatctacagcgaaatgttgcggaacacaccttccagctcgtcaacatcgtcaaacgccttcccatccgaatatttcaccccatcgaacctcctctctggcatctaccctactttcgatcaaagccgcgcggacaaggtcacttaccaaagcctgatccgagcgctgggatttcacgggaacgtcgtcgctgcactcaacgtcatgggagacatgttgagggacgaccgaggctataccgtcgatgtttcagattacgtcgccgtaatgcaagggttcgcgaaattcggaaactcgctcgagccggaagaagcgcatcggcggcaggcgaggaggctgtctttccacacagagaccgacatgtccggcgacctgctcgaggtctttccaccactcatctttcccgaccctttgcccttggtacaaccctctgagcgcggatcgccctcgtccgagaccatcccgagtatgggtagccgtaaagacggtaaaccaggcagtctaaaaaagttgaccgagatctggggcaacaaagttgatggatgggtcgatgattccaccggcactccggctctccgagaaaggacgcctggaatggacatagctatcctgaccaaggtcttccgagccatgctcgggactaagccatcagtccatgataccagaggcgcggtcccgtcgaggtcgtcgcgctactatgcaacctcccgccggacctcgcttagcccgtctcctaaagcaacctttatcgtcttgatggcattcgcaagatgtagcgacggcgatcctgaagtcctcaaaagcgtctgggcagacctggaagacaagtttgggactgcaaacgaagaaggctgggtcggctggctggtggataaaaggctgcaaaggattgtgcatgaaatcagcaaagtatgaggaggtccacccacggccttcccacgagatctcgcaaattcgtactcgacaatttcctgcatcttatgtagagttgtcaggagccatcatgttcaatagtctctcagtaacagctatagaatagcttacttaacctgacgaatctgcttccgcgaccgggcctgatccgatctcgacctgatgcgattgtccaagacctcatactttggtcgacaaaggcaaggctcgggtatactagaggcccgggctacctttcttcttacctaattcaagctagtactttgacgttgccatcttctgtcaacccggctcgatcccgctgttgcggtcgtcatgttaaagctaggctgacaggacatgctccaaagaatctgatgagcagacggccgcacacagtctggatatctgcagcccctcctgattaccttcggaagaactccactgtctaagcgtgctcgaatcgtgattcgtgatgtctcatgaggtcgcccctgaggttatccccagtgtaccgtcatccggcgtacggtcctcgtcgcccgtgagctctcaacagcccacgacggcgatggacctgcccatcagtcccgacataaatcatgctcgagcaacttcgaggaggagacgaccactcaagagtccgcagccatcatctcggaaagggcgacgacataagctgtccgataaccgtgacacattgtctaatgctcccgcagaccccggcatatcgtgtgatgctcaaccaagctctttcagattggacctgcgggcaagacctgaagtcaagccaatctactattacccgccattctctctttccgcggcatccgaagaaggtgactctacgtgtattgacggcaacgcgacaagacgcagatctcgaaatggtaggaatcgatcgaccagccgtcaccggcgaccagacagggacaaggctcttccctcgtcgcagcgcacggtcgccgacctttttgatggcgattgttcatcggtcacctcatctgaagaaggcaacaaccgtcatactgcctctatgggaaacccccatcaccgctttgcgaagcaagaagttgttccgagctcttatccacaagaagagccagagcgcgctctcctgtccggcggtgagctgagaccgcctcattccgatccagcgttcggtgaagagggtgaacgagtaccaagctctcagcgacaagaggggttagacgagatcccccttttcgatcacagtgagggtgacgtatatctcggagagacgtggacagtaaatacgggtgaggagaatctggtgggcagtagtgccatgaatacatatccggtggaggtgagtcttaccggggcaaccacctttggcacaatctcatggtcgagtcatggacccatgcagaaaacgcacgaggagatcgcttgggatcagttcgactgggctgagccacaggtcgcagactcggtagaacaagacccagccggggattctgacggctcggaactgaatggcagatctgcgcagaatgaaagcatgagcgccctcggagttcatgatacggacatgccgatgacccgtggcgttgggccacctgtaccacacaacactatcgaacaaacctccagagctagtccgacagcttttgatatgaagaccgaccaggtcgagaacatggatatcgcaccgacaagtgccgcattggtgcctcggagagatgttgcagccgagattgctagccggcttgccgccattgagcaagaagaacgcgctcgagctgctcaattagccgcagggatggagtcatcatcggatttcgacgatgatgatcttatggacttagcagatctcccaaagaagcgcatcactagtcgacaggtcggtcggtctgacagggttcttcgtgcgccgcaaatcaagattcaaccacccacagtgactgcaacccaagtcgcgcctggtcttcagggcggtaagcggttccaagccaaactcgcggagagagctttggccatgaagtatttgaacgaacctcacgatgatcgcgacattgtctcggatgaaggcgatcatacgtcagcatcgctatcgctgcatgtagatcccgatatccagctactggacgaggagttggcatcgacggatgcaccagagccgttcccacgcagctttttcgaggagtgtagtcaagacgtctctctgctcgaagaaattgccgatctgtgccagatcaaagcgagccagatcctggtaagggagaattggcaaggctgcgtcatgactgcgctcgaagcatacggtcaagcacgtggaagccggtacagacccgaacacctgctcagcatgctgcgtatgagtgcggatctacctgacgaagctttcggattcacctatcgaaacgtacagagcgccattttgcgctttagtccgttgcacatggagaaagccgcatgcactgtagcaatgcatctagctcagcttgagaagacgtatttggaagatttcgaagcgcatatcttctccgtgaccacttcgaaccgggccttctcacggtatctgtcatggattctcttaaactcagatgatgaccacgtggatgactccaaggtatgtattcacggtgtgttgcgacgggtaagtgttggcaactttacgctaagcttttgcaatgtacaggcacttagccgctacccgttactcgaacgcatggaactttgtcagctaccgctgtaccaaatcctcgatgcctgtgaggactcttacgacagccgcatcagtcgatatttccggcttttgagtgtacactggcaggatgtgatcgaactgttgaccgcgattgtcagcgaggcagagactgcaaaaacatatgctaggcaagaaatgatcagctggatcgaacgaatcgacgccgtcctgtgctctctggccaacagaattagtatgttcagatacacagtgcttggaaggcagctactaacgttgatcgacggcagtgcctcgagcgaatgaagcctacgaccggcgcaaggcccgagacagagaacgcatcgaaatgctcagaatgcaaatcagacgacagggacaaacctgtatccaagccatcccggtcaagggcaatagtctgctccagcgtcatcgcgctgctctgaaacagaagacccccgacaccgccacagaccatcagcagcaggtagaaagcagagaggtaacgaaaacaaacacgaaggccaggaacaaaccggacaagggccgacctgcaccgaaaagacgacggggggaatgacattacgactccttcatatggcatacggccgatgaatggccatgagacacgactcgaatgtagccagctgcccttggtgtaacgaaagtcccaattacgatcgattcatttcaaaacgagctacagcatagagacctctagggtcgcgcgaacggatacacggggaatagactactgagactcacaatgggtcagaaacaacgattgcggaacactattgactgatactatacttggatatacggagagacgaagcaagagaatcaaaacgtccatcaaggatcagaaaaaggtccgctatccacttcaaagagcgttcgagccacgctttcgccttctgttcgacgacatcctccgcttgttggggaaccacggttcgtcatctgctctagctcccagtcgacctggtagccatgattggcaaggtcgtagcaggaccctggcagtcccatcggactgtccagcagtcgatgctctgccttgaattgcagcttgacgttgccgataggcgtctcgtggggaatgccgacggcgttgcgtgacggcgtggccaattgcccaatgacgttagtacgaggcgtgaagccggcggtacgatgtcgcgacatgggacccatgggggtagcaaagctgtcgctcgtaatagacgaggcatacgatgggccgatcggtgaacgaggcagtcggtccaagtggccaaggacatctgctgccgagccgttggagcggtctaatcgaggtgattggctcaaaaggtcgcctggtccagggaggctgaccgtcttggccgacttttgcggtttgcgatcgatgatgggcgaaagagtatggccgctttgagtgttgctggcgaggttggtctcgagaggtgatgtcttgggacgttgagatttggtcgggggagcggggattacaaatgctccatcaagctggggcgcgggttgcaagcccatagaatagggcttgcgatggggctcgggcagggcgggatccgagctaagggcgtcgccatcctgacggattcggatagcatcgtccgagtcggaaccgtcatgcatctggctcgtccgtcgatcgagcccgtgagctcgggcgacggtcgtggggaacggtgaggatgacactggcgatgacgccgatggggtcagctgaggcatcatcatcgaagacgacagcatgtgagctcgatgcaaaggattgctgctgtgaggtcggttcggtgttgtgtaatcatcggcgttgaatttcccttgagagctggcgctactgtgtacgagccgagcggacatggggattggcggcgcacttataggcataccaggatggtggaacgtgtcttcgggcgaacctcgatccatgagcatgccagtctgcgtgttgacaactatgggcgagccggtataccgtcgaagcttggcgatttgctcccgtgtcaagcccgattcctcctccggttcacccatgccggcctgaccgttcatggccgaattcctcctgaagccagctcctgatccaggacgggacccgggctgcatgggtgtcgcccacgtgttggccttttcgagccggggtcgcttattgccggtcaaaggtccatcaaccggcaagggcgagcactgcaggccgtgaggaccatgaaggtattgttcctgcccgagcatgatcggagtagcatgcatgatcggggtggccatctcgacgctgagcgtgcgtcggacctcgacttcacctacagcctttcgcttcttggctttcgtagcagatgatccgaggtccgaatcgtttgacatgacctgcctcgccttttgctgtttcttgaaccctccatccttgaactggaactcgagcttgggatcgaccatccagacggaccccttgcctcccttttcctcggcgtttcgttcccccttgacgaaacagtcgttcaaactcaggttgtgcctgatcgagttcatccacccgctctcgcccggcttgaagtatgggtaagcggccgagatccaggcgtagatctggttcaatgccaatcgcttgcgcgaggaggagagaatggcctgtccaatcaaggcggcgtatgaccacgaaggcttctctgccgagcgaggtggtgggggcaaaccttcgggcacgtacggcttgtccttttccgaggtcgacgttttagcagctccgttcgaagtctttcgtacggcctccttgggcttggtgtcggtcttgcccttcttgccggtgccaccggcagcagcagtggctttcccgttcttggtactcaacagagctgcctgtttcaaagttccgaccgacttggcgtccttgcccttgcctcgtcgggtaggagaaccctgggcgaccctcgcggcggccctgctactgttgctctcgacgaccgaatctctctcatcgtcttcatcctcgtcatcatcatcttcgtcctcctcctcgtcgtcatcatcgtcgacttcttcctcgtcatcctcctcgtcagcgctgctaccctcttgctcgggctcggcgttcttgagtggttgcttagtccgtcgagtggaggaaggaggaggcggtacaacgagcgatcgtttcttcatcttgctactggcgatactggcctggtaactcgactcgctgaacggcgtcaacgagcgggagagcatggtcccggtaggcgagacggcccgaccgcctgacaatgccagttgcgaggaagacagctggatcggctgttgttgttgatgttgttgatgatgagcatggtgtttttgctgctgttgttgcgacccgttcgacctcgcgtgttgtagcggctgctgatgcaagtatcccgatcgtccggccttgtcagtgggggaagctgtcgatcggtcgtcctcgtcttcttcttcctcttcctcgtcaaaggcctcggccacgctcatccgatgaccaaaggccgaggtagaccgggtcaagccgaccggacgaccgccgttgttccctccaggtccagcctgaccgaacgcgttggacccggactgaggcaagaggtcgtccatgtgcaccgtctgcccgtcgaccgagaacggatcctgattcttgtacaggtagttggtttgaatcccgctcccagctccgttgttctgatgctgatgatgcccagagctactgcttccgacgccctggcccatcatcatcatcatgggctgcccggctcccgaactgtatcgcgctaggggggtatccatcggttgcgtcgtatggggtcgcacggggtacatcatcgtctgacgatcgacatgatgaccggtggaattgttaccgtccaacaaccccccgctggcctgtccgctccaggacccttgcctcgtcaactgaccgggcctcagtaatcccgcagcggcggccgcgttggcgttggcgttcccagaaggcccgccggcgagatgatacccgcccatcatcatgagcgatccttgcgtctgaggcgtcttcatcgtttgcgctcggagcgggacgggtcgaaccactcgcatcggcgcggtggactttgaaccgcttcccgcagcgttcccaagatgaccccgacctccggacgcgtcttccccttgggatgatccggcgaggtgatacccttgtccttgcacgaggtgttgttggtgatcatccatcatcatcgtcgaggaagaagatgacgaccccgaccccgacatcattcgcgtcgcgaaaatttgagatggctggaaattcgggttgaacagcgtaaacccgtcgaccatttgatattgatgttgatagagtccagggttactgccgccgttgtgggtgggcgtgtgcacgttcccagtcgaatgctgtgaatgcaccgtcaaggtcgacgttgatcgagcgcgacctgatcgactggctttcgtaggagaagggggcgagagcctgttcgatggcggctctgtcagccctcaagaacaaactcctctttgcattacaccgcagtggacggtcgactcactcttgcatctcctcgactatatcctctgcgttcagactgacaaactcgctcacttccggggtcctttgaacctcgacgtcttcttcgtcctgttcctgctgactgatcactaccgacggtccgactccggcgaacgtcaacgctcgaacgttctgggattgcgggtagacgtcgacgttcgagttgaagtgagcgggctgggaaggtcggtagacgcttgccagcatggatacgagggggagggtcgtttgtgctcctcgacgacgcttgcttagagcttcctcgcgcggagaccgcctgatcgtgcccgggaattccgtccaggtcgtgatcaggatgtgtaatgggtcattcgtttcggactgcaagacactcaccaggagatcacttagtatgtactcctcctgcttgaatttgaatggagatgatgcgaggttggtgtttcaaaaagtcttgaagatggaggacggtcgatcgttgggtcgttcgctcttgacgaatgacgagcctcggaggtttgtgggcaaggtggctacagggctgattctagcaggcaatacgagtcgaggtgggagacagttatgaaagcgtttgtgtaacactgtcaagagctactcgacagaggtctggtcgtcttattcaatcgacctgcttctgatgaccgtattgaatgagacggtcgataggtggtcgatgtcctgggaaaagaggcagcgagagggcaaaggcgggcaagggagggagggaaaggctcagggcgagggcaggcaaggaccagccgcgcgcgaaagtcgtccaagacgcgtcgacgggctagcacgaggcgagggaagggggggaaggaggactcaggtgaggccagtcagagacgttggcaaggggccgtgacgcgacgttacgttaccatgaccgctcacacgcttcacatccactcccaagcctgcacgaatcctctgatgataagacatgccgctaggtgctggcgatctgggctcgttgcagagtttgcttcgtcgagatgaatggcatgtcaatgttcgtcagccagccgtacgggccgggagatggtaaaatgattacgatgggcgcagatcgccgaaggcagcggttcactggcgcgaatacgcggggcgccgacctagacggcgagacgatcgatctccggcaaaagctttaattcgcatttaacagtgaatttcattcggctcttctgtcagctgtcagtgaacatcacatccttgctgtatttgtctactgagacggtcaatcggatcctttgatagctttttcgtctgggtaggcaggaaagtcaaattcggtcaacgtcgggacggattctcggtttcatcgtgcggtcagctcatcgctcgttgctcccttcgtggggacctgaacacgtctctcgagatttctcgaacgaccctcgaggaatgacgtcacgcgtttggacgattccgagaacgacagcttccgctcttacggcagctattatggcagtcagatagctctgacggcatgcatgtcactttgtcaacaagctaagggcatgccgggaattgtgtcccgacttgcaacttgcgatttgagaaggttcagctagcaatcaggcatcaaagctctatcgaccatctcaaacctaccgatcactaacgactaccgcgaaccccctgcttggctttcagttctaactcgagtcaacgatgaccaaccccgaagacgtcatttcggaagaggactacctcgtctttccggaccatcccaagttttcgttcaaacctgccgacaaggtggtcgggttcgatcaatgggtctgttccgggatttgggtaccgctcgaagccaaggtcagtctcctccactcgatgcggatttcttgggtactaaagtcctatcgtctctatggccttgtcattccggttcgctgcgcaggaaggaaggcccgaacgagatgcctttggaacgcccaccctggagctcgcgtcggtccatcagaccatcagtgaaggtgccgtacccgtcctccctagggccgacgcttggaagatctctagggaccccgagtgggtcgaatctttggggaccaggaagggggtttggacgaggtcagtcccgtgtccacgctagtcgagcagaaaaagggttattgatgatcccatatccgacgctcggcgctgtggggtcctttgggctggaaaaacacagcgaaaacaatcctttcaaacgaagtcggtcgatcgagccatccttcgcttttcagacacaatgctgattacccgcttcgttgtcatctcgcagccctgaacgctctcaaccaattcctcaagtctcgcgagaccgccattttcacccctcatcaggtcgtcatccagggcttccgcgaccatactggtctcttcaaggccgctcatgagggcccccatcttcccagcggaatcgaggcctgggggggaaagagggcggagaagaagatcagtcagtgggaagaggaatgctggtttatcagggacatggagggctgtctcaaggcgttctgggaggactcgatgtgccgacctggagctgatcgcatgaaggtgaccgtctacgacaagttcggtaagctttccgagagagaaagtacctgtcccgaccgtatcgctaaagatttgtgacgggccgcgaacagagattgtccgctcgtttttgctctacatggagcattacgacatctacccaaaggcgcaggaacctcacctcgctcgggcgctcgagagatgctgcgctctgtcgcgcgaagtgcaagacaagatgtatacgacgtcgatcctatacggttctctctgggctagagctgacgggtggtccggtttgggcaagaccatctgggcccccgaaatcgatgacgaggtggacgaggacgaacagcgaaaggtcgtcgactatgcagcgatcgaagtggacgaggaggcgttgagagaagggatggacgaggtgatcgttcaggacgtcgagcaggcatatgacaagcgaggtcaaacgcaagatgagcatggtgggcagaccgaagaggaacacaatcagactctggaatcttggaccagggctagtgcacgtaagtttaggtcgagtgtatcggttttagtagttgtagggtctcatctttgcctctcatgttcatgtgcgtgacatgatagccgagctcaccccgttcgcgagcttgccccgggcgactggtgggtatcggttcagttccctcgcgctgttgcacctcgtttacttacgccgctgaacttgcgccgcgacgctatcgactctttatctctctcgaacgtatgccacggtaccacagccttggtcaagctgcaggagtttacgggcaaatccgtgatcccggatgactatgtcagattcgagaagcgtactggtatcttcgatatcgaatcctttacccatgcgacggtctcgtcgtcggactcggttacgccgtcggactcgcccgagatcgggttatctcgtctcgcggtcgataagcggcctaaaggattcggtcagcttgacctggtcgatgcgtcacgacccgcatttaaggcgaacatcttgatcgacatggacgaaggcaagactgtagactgggttaggatgaaagagggtgcaaagggactgaaggttcgaggaacattggtcggtgtcaaacgcgggagagagactggagagggggagacgatctggttctttgccaagatcaagggtgtcgatccgaatctcgattaaacgacgaaagatgatgcccgcatcttgtgggaacactactacgactgaagactgactttacgacttgtcatgtgagactgcctgctgcttcacccggcgctgcctgatatacgatatggataccctaccgtttcggtgtcaaaggccggaatcggtggtggtcggctggagagttccgaagttctcgcgggggcggagggggatcagttgagagccggaccacgaccctgcgaggatgggatgtctcgctcgtatcatcgcaatcacgcaacaccttgtcactctcatctccttctgcttgttacatgcatggtgtgatgagtagtgaggccgaggcagtaactcgggtcagaacggtatacctcatcacaatcagcggatagtcgtttacttcgagttcgccacatttccctactttggatcttcctccgttcgatcgcgcaatgtcctgtttgagcgtcaaagagagccgatcaacctcttcaagacggctctgcatgaccgacatcgcacccctctgaggcctgccataacacaacctagaccccggtaccgaacaacaaagtcgcgttacgtccccggtcgctttcaccagcgagtgaacaacctcgctctcggtcgagcgaaccttgggcagggagagcgatgtcgatatcgagtccggccattgccggttccacaaatcgaccacagcaggaggtcaaatacaaacctcgtcatgaacagcaggatcgagtcgcacatgctagtggtatgacttccccaaagtcgccgccgacacatgcgttcgatgagcgaggagaggatgatgaggcggacgacaccgaagaggaagaagacgaggatgaagatgaagatgagggtgaagatggggatggagacggggatgacgaagagaactcggatgacggatcgtcaactagatcttttcccgtcgccaagacacctatgaacagtcttgttagtctcgtggaagagaaggaggatgtcggtcacaaggacgccgattggtacaacacgggaaagcaaccggagcaactcgcttctgtccgggaagtcgaagaagaggactacatggacatcgaggactcatgggatagagggaatccggtcaacggatatcaacaagagccaggccgatcagacaggagcccgtcttaccctccgaacgacctgtcgtccgtgcttcgcatgccctactcgcctacgaatacaggcccatttgaggtcccgagaggaagcataggtggatcatccacaggcatgtcagctgggactacctcgaccgcaggaaggacaatctcgagcctgcatagtcaagccgcgctcttgttctctcgtaacaaaaaggcgccgggtggcacaaacaaagatctgggcaacctctttgacttgacgtcgaatcgatcgcatcagacacgtcgtccgaagaacggtctaccggctctggagcctctgcggttcttgcgaccgaatggaaaccaagaaattgaggacgatatcgatccacatcgggacgtcgaggccggaatcgacccgttcaaggatgatggagcgatgcacaaagacccgcaagacctttccgccgagctcggttcccactcgcagcacagctcggacaagtcatacaacgatccggtcgcacttgccgtcctcgagtcggccgaccagaaggagagggatcaaagaagacttgaacagctcgggtacagtcaagacctcggcagagattatggattctgggcgtgcttttccgttgggttttgcaatattgggagtcttcaaggatctctctttggtattttcactacctacagttacggaggaccacagtaagccccaaggcggaatctttggtcgggcaattccgatcatgactgacgccgtcatgcacatccaggatgatcctcatcatgtggcccatcgctggtttagccttactgttcatgaccttggctatgggcgagttggcttccgcataccctgtggcgggtgccatgtcgagttgggcgtggacatgcgcaagaaaggggatcggtggggaacgcgcttggggatgggtcatgggcggtctcgtgatgggctatcacgtcggtgtggtaagattatccgtgtccgagcgtttccctgtctgtctgggctgaccccgcgaacctcgtcaactacagatgtgcttgatcagctggcagtccgccaaactagtcaatgagactatacacctggctatacgcgattacctccttcgagactgggtaacggcattgttcagcatggtgagcagcatacattgggtccttgacagtccgtaacagatcgagttctcatattgttgcatcactgtaggccctcatggctgtctttggctttgtgggcacatctaaatggggtcgtagcccccgcttttgggtcatgtcatgtaggtagatcttcagctgtcgatacttcggcatgccctgacctggtttgcttgcaggtatctacatcttgtccgtttgggctgtgttgtgcatctcgttgctcgcaacccgtgacaaggtaccggctcaagacgtcatctacggtgcccctttccggaataattccggatggaacagtaagccatacatatatctcgtaggggctattctttccaccattgcaacgggttcggtgagtcgtcgccgctggtcgaagcgatcacgaggggtactgaaagtatacgttcttcacgtcaaacaggatgcatgtgcacagtgagcatcaacgtcccgcggtcaatgcgcttgctatataggctaacaatctgatcaatattagcctggcagaggagacgcgtaatcctgcgaggatcgtgccgttggcaatggtcacatctgtagtagctgtgagtcgatatcgtcatctgtaccgtcaagggacacgactctcacgtgctattcaccagtcgtatatcgtgggctacgtggtaagcttgacgatgccagaagccacccaaagccgaactcatatatccactccacagtgtattttgatcattctgttgtcgattcatccgtcctgggtcaacgatatcgcacgccacgaatttccaacagtaagaaacccactgaagtcactggccttcagagccgttttactgaccagtggccgtgctttctacacatcaggggcaaatcctgaagcggactctagggctcggccctgccattgcgatcctttccctctgcgttgtggccttgtgcctgcaggctaccgctcagctgcaagcctcatcgcgtttcgtctgggctctagcccgggatcaagccatcccgttcagcaagtatttctatgccttgaacaaacatcgcctgccagtcgcagctacttggctcgtgctagccatggctttgccaatggctgcagtcatctggactgcgccgcatataacaagctctgtcttgagtactgcggccggtacattttgcatggtatcttacgtaagtaaaggcttgcccaattcatcgtagcagtgctaattcggtcatgcacatctcatcagtccgcacctacgctattgtaccttctctcgaggaatgatcttgcgcacgagtaccgctcgagttggagcttacgttggttgaggtaggtggctgcgacgggatttagtcgtgggttgtagatattgactttgcaaacgtttcagtaaaccaattgggtgtctggcggtcttcagcgcggccacggtcatcactgcaatggcatttcctacgggatatccggtgactgctggtgagtgtgcttgcctcgttgttccatgtcaagacatactgacagtcgaattcctcggtcgcagaaaccctcagctggagtccaatcacgactgcttcagcccttgtgctctcttacgtgacttggaagctctacggtaggtgaccttcgcaagtaacagataaattgcaagcctggctgaagtactcgctgctaaattcataggtgaatctcactattcggggcctatacggagcatcacaaaatggacagccggagccgagatcgatctccgttccgccctccagaacccaaatccatctagtcccggacagacaccggacagtagacgctttcctggtcagaccgagtccgaatttttctcgccgtccacggtgcacctcgaaatgcaagggcgggtcgatgcaggcgcgaatgatactcaggatcacatatcaccttcgaattcaaacccaggcgtgtcgcgataacgatacaggttacaggttactcaagtactcaggttgtagatcatattcagttgtatatctaatcgaggtcgtatcgaattcgatacaatttgtaacaagcaatgtaaaggcaaggagcagaataatcttgaaatatactgcatcagaaagctctgtcgtgatacatggtctgggtcgtgaattatgcgtcctctgccgcttcgtacaaatcgttcttcttgatgatgacctgtggatatagtcttgtcaggatacgggtgggtcggtccaagccagttcatttcgctcacaatgccttccaatgtcgaagcgtaagggaagtactcgttcgtaccgaactctgcacgctcgcccacagcgatacggaccggagtttggtgtgtttggaactgcaaagttatcccgttagtttcggcacgctaggcattgctccgtttttatcttcgaactcactccactaatacccatgcgctgacccgccaaaccgacggtattcacagcctgaccaactcgaacggtgatggccttctcttgcagctcctcatcgacggtgatcaggaactgtggatacatggccgtgacgagccagtacatcatccagtgggtcttgtccagaacaactgtcaagcacagagcgtcagttgctttcgtagtcacgtcgatgaaccacggcttacatgacttggattcggtgaacgcgacgagaagagacaagagaccgctgatggcagaaggcgaaaggatctgtcgatcgttatagaaggggttgataccgattgttcccttgcccatgtgtacgagtccctatatgtgcccagatcgcttagcctctcgcttactggcaagatcaaagcgcggcagtctcacctgtgccaccctgaccatgaacaggcaattcgcctccttggcgtaatagctcgccagactgcgcagcatctgtgccaaacgagcgttgttggtgcctgctccgacgagacccattgcgaggatagcgttgacggcaacatcgaggtcattgtcatgcgagtaccttgagagactgtcgaggatgggaagttgtggattcgatgcagagacgagaccgagagccaaaggaacagcctttcggactacggggtcaccgtatgtcatctgtgacgagtaaattttcgtgcgtgagctggtccgaccacatataaggactttgaatcgaagtacgcacgaggtggttgaactgtcgcagcgacatgtcggctccgacatcctcacccatggcaacaagggcgattccaatgaccgcgaatgcctggtaagtcatatcggcaggggtctcctccttcttgtccttcttctcggcgtcggctgctgtctgctcttcggcggtcgcagattcttctgattcgtcaattttcgcatctgactttggtttcgaggcgtgatcgctgcagtgatgcagcatggtctgaatcttcaagacgtttccggtcgcggcgtacgagcacatgtcaaccatgatctccgcctgcttgccgatagggtgttcgatggtcttcagcagctcgatggtagcctctgacgcttcttgtcgacctgttttgcaaatcatatgtcgtgagcgagagcttctaggtcaatgcacagtatctcgactgaccgaggtagatgagtcccaacgccaaggcaatgaacctcgcccacttgtcgctcaaggtgctctccagccgctccatcaacgactgaacaatcgtgatcgcaatatcaccattggcagacccgacgaagacgaaaccaagcgcaagggcagcgttggcggcgatctccatcgaagtgttctcttcggcaacatatggaagaagcttgtcggcgatgtcttgtcgacacgatccaacacaagcgagtgcgatactgcagaacaacgaaggtcaggatcgcggtacgattcggattcggacgatcgaggtcacagatgctcacccattgatcgcggcgaccttcaattcggtcgacttgttatcaacgtgatcctcaagcagcgcatatgctacatcgagctcggtgcggactccgctatgcaaaatacccgtagccaagagcgcaccggccttgatatgttcctcggaagagtacgagtacttgtcgacctgactgataccgagctcggtgtcccacaacatgctcatacccaaagaggcagtcgcactcatcatcccgtgatccttgtttttgtagatgaaactctgaccctcctcgacgtcgacgatcagcttgtcgttaccgtaaccagcgttgacaaaggcgttgacaaaggtcccggccaggttcgctcgcgcagagtcgatcgagggaggggcacctggataagatctaacgtgagatcgggtttcgaagacgcaagactacctgtctgggaatactcacgaccagtctccaggtgactcttgtaaatgtcctccaagctcttgggctcgttgacatccaactgttttccgaacctcttgaagtgctcggtcaacttcaggttgcccaaacattcgagcacgtcgtcttccagggtgggaggcgccgtctcctcgctctgcatctcgctttcgtcctgctgttcgtcctctggtggggtccacgactctgggtcggaacaatggacccatgcgatgggaatctgcgagcgtgcgaggaagaaggcgagctgcttcttcatcgaactggatcgtcatcgcgaagtgaagtgtgtcagaatactatctgtctcgccgatcccgtgtctcgcctatcccgactcacgcgttcatgggagattcgaagtactttcgaatcaactttctgtctcttagacgaacagcgagtgccaaagcctgggtccatcgctcgtgacgggcgtaaataccagcagccgtcctcaagaaagctcggtcgtcgggagagacgagcaggggtacacagctggatatgaccggatgcgttcactttagcctacctagacgatatcaacagacatgctcgatcccggcaattgctgctcacctgaccatgtactggcagaccctgttgtaaatcgcgtctccctccttgccaaccaagaaactgttctcctcgagactctcgatgctttccaactcgagtaacaagtcgacagcgtcggcctctgcgttgtgggcgaggaagaagggcaccaagtcgagcgcaagggccaacagctgatcccttgtcttcaactccctcttgaccttttgctgggccgtcgtcgctgcagggatcgaaagcgttccaccggtgacgatcttgtcggcatcgtctacggccatcgcgtcggccgacttgggcgtaggtttgaccggctcttgctcgggctcgaccatcccggccgcaccgttgatgatcaagctgtactcctccccgatctcggcggccaagtgtcgtacgtattcgttaccccaatcgccgggcttctccttggtgccagagaacagtcggtaatgcaaggtgtcgcgctgaccgttatctgagtaagtcattgctagaaccgagatgatggagaaagccaaagcctgacagagcccggaatgaaggacgccagatcagtttgagctcttcttgcaaggtgtattcgcgcgggccgtcccgactcacccgctcgtccactagctttgtctcgtcgaatccttcgaatgtagtgatcaactcctggtagaacggtcgcaggaacttgagaggtttaggtacggcagtcatggaggacgtcgaggtcttgatcagggttcggagcgattccagagcaggcatatagagggaagtgtcggattcctggagaaacgagagtgagcggggcgcttgtgagcttcagcgctattctgggttgacaagaggcaggagaagcaccggtttactgacttttaaacgttcgacgagcatctcgagctcgttcttcagctgaatatcttcgtcggactgtcgtgccgaacattagtcgaacacggaagcgcaataccaccagatcatgagccatccgactcgtaagcccgcctcttgactgcatgtcaatcctacttaccatctcctcctccttggtctccttcttgccatccacctgcttccccttgggatcatacgtcttttccttcttttccgccccagcgggatcttgcgatggtacggcgatatcctcagctacacgcttgtccacgccgtcggatcgctggttgtcggccatgacgcaagggagctgtcgagctatttgttcttgaaggcgttcggaatgaaagttgttgaaagaggcggtctagccctggtctatgtttctatacgtcaggggcggactgacagaagagagcgttttgtcttgtcttttggctagagaagctgtgttgccttgtgttgactagtcgtatggtttgcgtgatatatgacccttcaagttcaagttcaggctcatcatcagctcaaccgatggctgtcgagctgacgaagcgtggctgagctagggaaatcgggggaagagtagggaatgtgaggtgggaacaggtatccgcggtgcaaacatagtcgggtcgatgacgcgtcgaatctcgtttcatatcgagctctgatacgaaactgatcaaagtcgatctgatcagcttgcatgccatacattcagcactgccttgtctgatgcaagaggagtatttcgacacgatgcgggcccggaaacgatgagctttagactgctcgtacattccgatgtgcccaaaccgttgattcaagagcgtcctcgctcttgagggattgccgatgagcgtacgtcgaagaatccagttctcacgtttacttgagattcccatgatgtcctataatgagctccgcaaacgatgtacttgccatgtacatacaggtcgatagacgtctgtgtccggcgatggctgatgcccacctgttgactgcaccaatcgaatagatccgattccaggtggctctctggtcgtagcagacagaactcctatcgactctaccacgtctacggtctgggccgctgatttcgatttcaattctcaactgtgcatcgtttcaggcacgatgcatgttctctccgttccggctctgtatcaaattgaacaacaaccctcggatttaggtatctttgatgccgcaaaccccagtaggaccaacatgatagatgtcgtgttatacgagtgtactggcgaggacgcatcgggccggcagtgaatctcgaggctgatgcttacgtattacccaatacactcttgctgtttggaaccgtcaacgagcacgctcaccccggccggtcacaaactccatgcaccgatggtcaagaggcagatacacaatcatgttgaatctatctagcaagaaacgacaggcacaacgtctttggaagctcagagaccatgtcaaaccgggatcatcgcccggacggtgatcacgcccataagctcccgcgtctttccccttttgcccgtgactcgctcttttgcttcagctcgaacccatgcccgagcatatttagtagatctgatatgcatgcatgtcaaatcagtggaccgtttgtcgagcctatcggcccgggtctaacggtggcgacttacctttttcttctcgtccaccgagatgcctccgggtcctaggttgaccagaaggagcagaccaccgacaatggctgagagttcacgcaaaagtcccgatggtcagcgtccgaaacttcctccaaaagtcacgctggcgggaccggccgactcacacaatgtttggaaaaagtcgtatcgcttgaaatcgagagaagggttggacgggtgcagggaccaccagttgttgacgaagacgttggcgacgctcaagacggtgacgaggagactggcgctccacttggccttaaaaccgacggcgaccatgatgcaggcggcgagaccgaggagggagacgacggctcggaagagggtgaacttgccctggaaggcgaacccgataaagaggaagatcaagaggacccgtccagcgagttggaagctacgattcagagaagagtcacgtagtgtcagtctttccggaaatttcgaatcgtctcaacggtcaccagagcgctagagataggactaactatttccttcggtccgtttcactgatgctaggcaacccggcaaacagcttcttcttggtctgcagcgagtcggaaaggaccatcaagagtccaccgatgaccgagagatttcggaggaagaaggacatgtcgaagatcagaccatatccgagacctatgtgaagagaatgcaagggtagtgtcccagaacacgtcagctcaagttcgtgggattgaccactgcgagagcaagaacgcgaaagatgcccaccttgtacgactactacgctgagaagcgctccgacggcgtactcgggatacttcttggcaatgacacagtaagaaccggcgatcatggcctagcgataggttgcagttcgaggatcagctcgaatatcagcgttcgtacgtcaaaggtaatcgactcacaagcacgttgaagaggaggaacatgtgagagaatccccagtaaaagtgtcggtgtctagcatgttgcgaatcgtcagacaaaggaacgttgtcgtcgtacgattagctgacgtcgtgtggtgtggatccgagacgaatgaccgacttttgcaagtaccacagctgatcgctccattgcgtcaagattcgaagagcgtcctcgataaaagtgacgacgataaggaacctcgcgagtgcggggatataaggcttgacaggctgggtgtaggcctccatcatgtcctccatccggctactgaatcccttgacccgaccgaggaaatcgccttgaccctgatcgaagccgttaccaggcccaccggcgcctggtcgacgaccgaccgggtcaggcatgtaggtctgcataggggtaggacgatacccagggatctggttcgggttgatgtgaacccgttgttgagccatgttgttgagaagcggtatgtgagggaaaggaggttgagcgcgggagtcgtggaatgtgaaaggctaagatgctaggcggatatgctagcgactgatcgagcgagaagtgtaggcggtatgtatatcgcggtggagaaagaagaggagacgataccctggtgaaaggtttgatcgacacaaagggtggtttagcgtcagcttactactgggtaccgaatccacaattgtgatggatgatgtgaaagagatgagagaattggttggtttgtgagtgaatggacggtgacgtgtgagcagcgagcgagtccagtcttggtattctgacggttggcggctgtgagccggaagcaaataaatacgtaaaacgtatgccgtcactttgagattgggcttccctttgatgtcaggcagggccagccaaacagaagcgcgccacaccacgaacctgtgcgttgttgccccttcacccggcatcatcatcatcagcatcatcgatcgtcaacgatatcatcatcaagctgcgactcctgaaagcctagactttgctcaggtccatctcttcatagcttcgccagtcatcgccttgtagactcgtcagccgtccgcctcaatccgtcaagatgggctactactcgtattacttttacgggctcggggtcagctggatctcgatctttatcatcgtagggctctacctcttgttcactggcaagtcgcttctggtcatcgaatagatccggtgggatgacttatatgacgatgttggtcgcatgtaggacaaggagagagcttcaacattggcaaatacctcgaagagacatcgccatacttctgggcactgctgggaattgcgttatgcgtaggattcagcgtcatgggagcgggattgtcagtactagacgatcgaggaggacgaaaggtatactctcagacgagactgacgattgggatcgatctgcatctgtatattgcgtggaatagggggatctacctgacaggatcatcgctattgggagccggtgttcgagcacctagggttaggaccaagaacttgatctcgtcagtcctcttttcggcagactcggtcaacagcccgccagaaagctgaagatgtctcgttcgtcgtcatgcttgtgacagaatcatcttctgcgaggtcgtcgcgatctatggttagtcgctcaggagctcttgtcctgcgcgatcgaatcgaaactcaaatcaattccccaatcatccgcactgcacaggtatcattatcgccatcgtctactcttccaagattactggagcgagcccagagaccctacacaataccgccaatacatataccgccgccgccctattctggggagggttgaccgtcggtacgttcgctttcacctctcatccggaggcttcgggcaaatgctaaccaacatctggtttaggtctctgtaatctgatgtgcggaatcgccgttggaacgacgggagcgacgtgtgcggtcagcgatgctcagaatccggaactgttcgtcaaggttctcatcgtcgaggtcagtctggggcttatgtcagaagagcacgagctcgcatcggcatcaacgggactgaatctcgttctcgcttcgcttgctgggcgactcagatctttgggtcggttctgggtctgttcggtctgattggtgagcgccgagcggtcggggccttgttcgaattgcctgataactaacgattgcgctttgaccccgatcgcatcagttggtttgctggtggtaagtagccgagtcttgtcgcgcccattttcgtacagaagcagagtctgatcatgtcatggtcccgggccgccttattctttttaacgaaacagtcaggaaaagccgaagaattcgcctagaacgagccgatcggtggagaagacgcgcacgagccccagctcgtggactggattcggaaagatccgagcaggtcggactagctcttgcgtatcctcgtctgacgacgactttgtaattctctttgcctcgtccacttcagtcgccatcttgcgagccgccagctctggctcgcacgtgcggagcgatgggcaccgaagctggcttgagagactttttcttttgataccacttatgacacgataattagatgtactagctggttcgcggcttcgagtatggcttcgcacgaaagggtctcccaatttgcgattggcctcgcctacttaagtgcgtgttctccatcccgcccgctttgcaatgctcttcagcaaaatggggtccatccaaatgttgttaggcggacctgccacgtgttgccagtcttgatcgggatgtctgggggtcaccagggcactgacgacagacgaggtaccgggagagcctgatccagaagcagtaaaatgagcccttatttggcttcaagctctccagcaagcccatactttactgattcgaaactgcctgaacaatgatttgcattgagaatatgtagaatcgacaaacgaatatgtcgtcgtgtcgactcaatagagagggagagagttacagctgcaacctgctgttagagatagactaaacgaggacaagtcggccacgtcgtatcgcgaagcgcgctcttggtcgctgttacatcctggggaaacgaggaacatcttctctggccaaggcaactctgacctcaaggctaccgcatcctggcgttcaggtctattcgctgtgcgcgacgtcagcgcttgtaccctgctcgctgactttcatctgagcctaagccactcttatgccgggctctatggtcgccatcgtatcgtatcagcatttacagcacgtctacattacgaggttcctcggatgtcccacgatcgtgaggatccgcaaggggcatataggtcaggcctaggaaatgagttcttaatggaaattaatgccagactacgctatatacaaggcgattgttcgatcacagatggcccgttcttggtgtcggagccttatgtgtcgtaccatacgagtgaggcaatcaagaacgatttctggactaatcgccggagtgatccacggatgttttgcatgcaatcggtcgaaggggggacccaagaggtatcatcgtctcgtcgtggcctgtctcgaacttggcttagcgaaatcaaaatgcggagctggctggctcttaccttctcgctcttggagttccgggtcaatgtagtcgacgatagcccccacttgagaggccggacctcgctctttgtgcgactcgagttccaggtcgatgttagagtcgatagccagcactcgagaggccgggcctgcaagatcttgcatcaaaatcatcaagtgcagcattcgagtcatgaatcaagggattagatcccttttggcccccctccacacgtcccttctaatttcgtctttggcctacgcaattagaagatgctatatagagcaccgttgtaatccaacttgcatataggatatgtaccattattacggaaattccccaagatcatgccgcatgtcgatctgttcaggtggcttcttcggcgatgagcgtgtttgcttccgatatccgggagtttattacccgggaatggaatcaacaccggttatcttggtgtacgggctggcggaatacttgatgccatacacctctactttgaagatacagctcatgggacttgcgcaacagagtacataatcatatcttatcatcccaagcattccaatcaacgaaccaagatgcctgacgctcgtaccaccaagttcttccaggaccgagtcgagaccgctcttcgagagcactcgacccggagcaatcaattcggcaagaacatctgggatcaccttcattttgcaagttgcgatctggaaaatgagccaggcagtcaaggcgcggcgaagcctcgtcgtaaagctaccgtcatagtagaggcaacagtcagggaaggtaattgatgctgctgtcttgagcataaagcttcggtatcaaggctaatctcattgtcgtctgccctcaatcagactggctcgtgagtctgttggcatccgccataaggcgtatggcttgatgcatgaagctaacttgatgcttgactgtacagaacccggtcggcgttcttcacggagctgcgacagcatacctcgttgacatgtgagcttcccctttgagcttggctgtttgtaaacggcgggctgttaatactcgatcaatgttagctgtacatcgcttcctttgatggcgctgagcacggatgacttctgggctggacttggaggtctcagtcaaaacatgaatatcctctaccatgctcctgcgccgctgtgaggatctccatgcagaccacctcgattgagcgatggactaacccattcatgctccaaccagaggtacaaagctaaaaatcatctcggagacccttaatgttggccgttcggtggctaatatgagatgtcaagtgagccactctttttgcatgctagacacgcacagccgctttactcatgtggcttggttggtaactctacagatcgtggatgcttccaccggcaagctcatcgcttccgggacgcacagtaaagtcgccaagaaccctatggccgcgaaactctgagatttctctacgatgttggggtatgaatgtacaacgagagccagtctgggctcgagataatggatgatccaatgaacatccggccagagcctcatcatgtcgtcttctgcttcttctgatccccctcaacttcgccatccgactcttcgtcgctactatcaccgtagtcgtttgcaagccctatgcgtttccgttttggggcttcattggctgctgcaaacccgatacgaactggcagaggctttgtgctgggagtacttgctgtatccgccgcgggtttagaaggcgaagaagccgatgctttctcggattcggccgacttggtgccgggaacagcgactggcgtagttggtgtctggggcttcgcagggggatccttcttcttcacgacgaccccttttaagaggctcttcacaccttttttcgcttgtaccggcgccttcgttgtgggcttgctgacgggcgacgcggttgtcgacggtgctatgggagtagaaggacccgacaatgcattctgtgtctggacttgcctcattctgcagaggtgactgatttcagctcggacatcacacgtgagctttgatagtggactgacttgaatgctgccagttcttccatctcttgtcgcttgatggaacgctccttttccttttgctcgtcggcagcgtctcgcaagaaagcgatttcatcggcttccagacctctccattgattcgccatcctcatcttgtcatcccattcctctctcttgatgtctttctgagtggataatttctgtgtacgtgccggaatgcagcctcgctgagctgttgtagcgctcaggctgaagaaagcagaacgactcacctcgaacaaggatctagggtcatactcttgctcctctggcataggagggggttcctggcccagtctgagcaacacaccagctgattcaatacgatgccatgcttaatgattgcctatcagctcacctctcataagccgccttccattcatcttccttggccttcttagcatcgtccaactcgtcttgtgtgacgaatcgggaaccgaccgttcccgacgtcgttagggatgtgatgtggccgagatccatgtttcgtgaagtgacaaggctgagagatccaagctagtactctacctggttggttttactgtgaataagagctaacttgagagtaggacagaaggaacgccggatacgacgcaagatgcaatatgatagctgcctcaacagcagttggttcgaaagtgcgcggaagcaaatcgtcaagtcgatcgaacttacctggctcaagcgcgcctcgcagctatctggaggatttggcctacccaggatgaccaccctcgagtcgatagtacaacgtctcagcaggtgtataacgttagcaacgacgctgctatctctgagctggaatatccggcgacagcttcgtgctgtctgggagagtttggacggaaggatcgagagtatatacttactgcccaaaacgatacagctctatgcatggttacaaatgaaaaatgaaagacatctatgtgccggtttactagatctatggggggttcactcgcctaaattcttttcccaaaacgattttgtggagccacttttgggatgaagtcttcgcgcgcattccgtcatatcttttgtcggttggaagcctcgttcgcattgcagaactgtgatcgtgctaagcgtcagacctttcaattcatcacttgaaacgtaagagaaagcagggaggcagaccttgacatttcccttgtacacaagcaacttccgaaacgtccggtatctcgccgcaatcgcgactgaaacggctgttgggacaagcaccgcaactttccagattagaagtgatgttgacgcactatacaccggtggatcagtcccaggaccaaaggggagagagagagaacgcaaatctcgctcacttcgaagcccttggtcgctcctggactgggacatgcggtgaagcccttcttgcagtagcgtgagttgaatgcttcagcactgatcaaaggattcaaagaacgtcgtttcctggccgggtcactcgtagtagcggcatatgtgacttcgaattcgggagaatcgacttcggcagaatccctccggaaaagctgtatgttccttcgactggctacttgatcggttaccagggcggtataatagtctaggccatcgcgtgtccgagtcagctttgcgttgaccgattgaggccgccccgatgctcacagcctgatcccatcgcgaatttattactgaaggcggcattttatggtcaatggacgggtcgtgatgcgtaatcctccgtctcatcaggcactcacttggatccgcaagtaaccgcggcctttccccccatacggttgcccttgattctgcacaaatgccatgtcaatcgacaaatgaccttgtcctcgaacacacggactcactgtgagcactctttggatgaaccactcggccaatgcaatgtagtcacgatggtgtatccattgcacgcttgcccgtatgtaaccctgtcggcgcaacgatttctagcgtcgatccaaagcctgcggcggtatagcaggcaagactcacatcgtcgacagctcggatctcccttgcaaaaaggatggtatgaagaatagtcttccatcgttacgaagcttcgtttccatctcggtccagttcagagaatcggcacatgactgagctccgcccgatacttcaataagtgtcgctgatggcagagcggcaacggaagagatcaaggggatggtcacactaggggccagagcgtctgccaaggtcgataccgtatccagaatgtacggagttccgagcgcatccgttaatatacccactacgttgtctgagtgcatgatgtcaggctaagatgccaagtcttctaggggcaaaacatcgaagactcacatcttcgctgaggcaccagtcctaatctgcttgacttgagtgtcagcgcaaattcgacaccagtagatgaaagcaacactcacaaaggtaggccaaggcacgagactgacccagctcccaaggggtctagtgccactctggttcatttacgttagcgattcctctacatactcgtacaggccgctaaggcaatggaactcacttcgagcacacataagactgggaagtcacttgatcaatgatctttagttcgaccttgtaatcggatcggcaatctgcgagaagagaacgtcgattagcgcagctcagcgcctgtaaaccgatcgaaaacgaacattgcgaagaccaggttgttccgagcgttagactggacaatagggattgcagcaaggaggctcccagcttgggaatgttaaaagactttgcgcacttcgcaggatccgattcatctggaccaatctgaggagagcgcaaaaaggacgttgcgtctcgcatcggtttcgtgcgctttctctaaactcgcgtcatcggaatgcttacctggtaatatgcggttgtacgggaagctcgaccaaacagcgaaaactgtcgagcagccagctcaaagtcgaaatagtagcggccactggtgatagctctgcttgaagtgcaaattaaggagagtcgaatgagctttagaaggtgagcaagagaatcgcgcgtacatacccggaataatcacagttgatactggctttgcggcttccggatcccgcaacgaaaggtgacgaactgagtataaaaccgatcagccttgtgggttgatcataatcttggcttagcttacgctacacattgcactttaggcctgcctggctcgcctaccagatccaaggacaaataatacgccgacgcacaaactgggtcgagataggtcagtttgatgatctccctcaagaaccgtgtgcaactcacgagcggcgttgtaagtgaagacgggtctaaagatcccctgagagagttgtagttgatccgtggctccttgatcgaacgtcagactggtcagacagtcactgacgctggctgcttgagtcaggccggccagcagcccgaggcatattgtcaacattagcgctagagtttgctgcattgtgaacagctcgtctcggtcgtcgtggttgcaccgcaagatagtagcgcaagacactagcttattaccaaatatcgctactgcaaagatatatactccaccagagagtcgtcctatgtgcgatgctccatcgacgattctcgatgagctactgcccgtcaattcacccgtcgctccaggtctcgaactgttggcgtttcacgaaaatgacgcgtccaaagcggaggttttcgtacgcatcgggtcgtgggggcgtggccgcggtggcttttctgagaccgacacggggttttcccgtgaagagcaggttgatcctgcccgagctggctcgagagccctagcgttgaccgaggctgaagtactcgtgggccgtgatccgagcccgcggttctgttccagtctcgcttaagtctcatatcgccgaggggcatcacgttgagacggatgttccgagatgaatggttggccggacaatcatcacccgaattccaaggcttcctcggaaagttccaccttgccggcgtgatcaaaggttctcgctaaagccattatatcttatcgtcacgcatgggcaccctagaacggttcggcaggctgaggtcgtaagtaagactgtacaaatacattatctgagagcgtccgtaaagatcgtggtggcgggcatcaaattctacactctaggggcaggggtgatcacagctcgtttggcgtacgcctcggcggaaggttgtccagctccgcaggcagaagtagcgggcagagccaagtcgtgagcctggtagatgtcggggtacgaacagcccgataccgtggcgaaagcaggtctggcagcgtaggtggtggtggggaccaacgccgaactgacactggaaggcaagacgctgtatgaaggcgcgagggaggggggcgagagcggagctccggtcctggtgtactggtacagcctagacatgtcggtggcgacaaagcttggctccatcgaggtcaacggccaggggtattcgaccgaagcggccgcggggacgtctccggcaccgacaccaccggtcatgaaaggttggtatccggtaaaggtcacctgcgggaccttgttggcgacacgctgacagtgaccttcggcctctcggggatcatcgggaatccagcccatctggagaccgagcttgtaagaccagaatggtgcgggattctcgtaacggctggtcgagccgatgttccaggtccagaaaaagttgctctgtagtgcgtcgacaccggcgaggtaggtgttcttgagcgcggcgatgatggtcgagttccactgctcgggtcgcatccattcttcgcaacttccgtaaacggtaccatcagagtctttatgggtgttctcccatcgagtaccgccatcgacctcgttgacccattgaccgcaactatcaagattacaaacaatctgtaagtgcccgcctctgcgtgcgctgggagctcaaccagtcactcactcgttccacgccaaagaccattctccggtgttgtacaatccgaatcggttggtagtggttcgagtagagtcgtaccaccaatcgcagcccttgttggcgatttccatgacgggtcgagtgtcttgaggggtctgaaagatggtgtactggtggacatccaacatcattcggtcgggaccggtaccgtcaccgccttgagcgaatccgtaccacttgtcggcaccttcgaatccttcaaacacggagaggatgggtccattgccttcaccgacaccagtgaggtttcggaatcggtcatgcatgtgaagatagctgtgcgcaggcagacgggacgttggtcagtgaagcgttcgaagcacaaattggcacgaccgccgtgagacgtggtactcacaaggatccgaggttgccgtgggagacgtcggcgacacggggttcgttgagaataccaaacatgggaaccacgtccttccattcgggttgcatgatgaattcgagcaaggcctgaatggtatcgagcgacctctgcaagttggcgagacccatagtccccgccatccagttggccttgcccaagtgtccactgtggttccatccattctgcgatccagcggcggcgtgcaagtccaagttgacacgcagaccgtacttgcggcaccaaccgagcgcctgaacgatgtacttccaggcgacgccctcgaggtagggctcacccggttgagtctcgagggcccagaacccgatgggaatcctgacccaagtcaacccggcggcagccatgttcatgaagtcgacctcggtgatgaacgtctcgtagtgcttcgtcatggcggcttcgacctcgtcgcccatgttacgggtcagggtgtactcgtcgaccgatttcccagcaggacccgtagggtaagcttcgtacaagccgggcacgatgaagggttcagtgacaaaccatcctccgacgttgactccgtggatgatctggtcccagttccaagactggttcaagggcggggtccacgaattgggacgagcatcgttgatgagcgggttcgtagggtcatacgcccaggttccaccatgccggttgacgtaggtaatctcggtaccgttgctcagttttagcaaggaaccgttacctcccgtgaccgggccagtcggtgtaggttcaggcgtaggtgccgacgaggtcgacgttggcaccatcctcgtggtcgtcgacccgccgacgacttcgacgatggggacatgactatccgacttgttcaacttgttgttcaaaccgaccccaagtccgataccgagaccgacgacgacgactccggcgacgattccgatgatccaccatttcttcttgctgttcccggcacctccggcacctcccatccaacggggcttctcggccagggcttcctcgccctggggatcggtcctccatccgaggttgggcacggtcgtgtcatccgcggcggagccaccagcagcgagaccggcaccggcagccaagggagacgctccgaggacggacgctcgtcgtgaatcgtcggcggtcaactgggggacgagaaacgaaaaatcgccacagctcgtcagctcccgggcagttctcggaacaccttgacacggccatgtcgactcaccccactggcataacttcctcgcttatcgatcgcacccgcggcgaaccctttgccgctatcgaaactggtgtacgaatcgtgccggctgttcctccccatactcatgaaactgggggcgggggccatgaacgagtccctgggcgcacccatcccggtaggaggagagtagggctgacggtacaacgggtcttgagccgagggagagttgaaggtgttcatgctgggtgagtccattcgaggggtttcgggaccgccactacatagcgtcaagcgggtggtcaagggagtcggtatcagcgctgtgtttcgagtcgattccggtagacccaggtggaaggtgattgcgactcacagtgctggggattcaagtcccgaggtgtccctcgtaggaagctcgacataatcaggctcaggggccgaggcgttggggttaggagcgggcatccttcacacacggagagagaaagccgcctagattttattcggtcgagcgagtaacaaagtagcaagtaatcctgatcgattccagtccaaagagatcaagagatgaaggaaattccgaagtgatcgatagaggctcgttcggtagctgatgcaacgtggtgtgtctacctgtcgacgtgatcgttcgaatgcagatcgaagatggacgcgggaattcgaggaacgggttgaaaggaagacgaaaagaagggtgtgataaatgtattcgtccgtcctgattgtcgtcctactgatgtctacgcctattatgttgtcgagatgcgaggcgatgtgtcgttgccgtgttgcggtgttgtgatgatgatcgctcgtgtatgtggatgcgactgatgttgttgtgaaacttctcgcttggcaaaatagttgccctcgatccgggaaagctggattgtagcgtgaagaaagggaaaacgaaaagggggaaacggaaaagtcgtcgtcacgaaagagatgctctaccaagggaatcctatacgaagcccagctaattaatacgttcgtaggtagctacgtaggtatagctctgtgagtgcagtagatcgagcggcgatggcacggtcttgtttgtttttgccatctcggcagcggaggaatgctgggcaaaaagtgatggaaatgcaaccggaggcacaacgcgcacaacctacacactctcagcctcatctcggaacgtatacccaagacacgctacgctgtgaggcggtgctgcgccgtcaccatcatcatcatctcgtccgtccgtcagccacaaagtgattcagagttgggctcggctcccggggtccattccctctctttgcttactgaccgaggttttcgcgcgctcagccgctgttcgaggatggatcgagtggaacgcagggcgcgctgctcgaagcccccgaggtaccttcccccgcacacgcacccgtcctctttgggggctagccgcgcgtactcgtcctcgagccgtcgtcaggcggctgtgggtttcgcaatataacaccaaccaccacagccccgcccggtcgagctagatgatggtgaccggatgaatacgagtcgatcgaacgggtgcgataatactccagactctcggtgtcagcccgatccatgcgtgaatggttctcatacgggacctgggatcacggacagatgaacgcacgaggaaggtggattccttctttccgggcctgtgtaccgctgtgatccggatcaacgtgatcaccgagtatcacatcgcatcgcactgcatcgcatcgcatcgtgtcttttgatcttctattctgttccgcgacaacgccgaaactctcatgacaacgcgcattacgcacgcacgccctttcacccagagccccatcatacccgtcaccaaatcgaaatacgtaccatcttttcctacatgatcgtcctctaagtcgccccggtgggaatgcgaaactcagcccaatcacgatcaaacgacccgtgagcccgtgatcgtgatcatgatgatgtagaccaaaaaaacaattaggtgatcatcaacagcacagccccggcgctcagcagcgcgctagccttccactgccacgcggggggcgtcaggggaagagtgggaaagggtaccgagaatcaccggtggttctgaaggtcttggcgctgcaccggatcggccgaacccccactcggatcacgcgaatcggtcgggccctggccgcggtcgatgatggatgcaaagaaaatgtaggtatgtgtttcggatcgaggtctcgttgtgttcggtctggaccatgacatggcatgaagctactagctactcgtcggcgcggacggactgtgcgacgaggagctggtgacatacgactgcagatcttgcgcgcctgatcaggcttgaggcgaccccggatccgatattcttcacgtcgcctttgctgccaaagattcgcgtctaatgcaaagccctgcgatcagacggaattctctagcttctaggctctaggtctcgtcatgtcaatttgtttagtgatagcctggcatgaggatgatcttgtcggggtgggacgatgtgcgcattctcctgggctcacaccctgccgcacgaccagaatcatatgactagctgccccaacacctgagcgtcatgtcagatcgatcgatgcacaaggcgacgcgcatcgtggtggtaacagggctgatgccgagaacgtacctcttacgagagtgtgacgttgacttcaagtggaggtcacctctcttggaggatcggttttactggcgagcgtgatggggatgtcgcgcttaaggtgaaggagtgggtgagatttgagtacgcgcgcttctaagtgtccggccactttctttcgcgagtcgactttgtctatgcgcgagggcgagatctcgcgcgtgtttgtctgtgtgtgtttgtgcagcaattgcgcgtcgccccctccccccctctccctctctgacctgccttccagtcgttcgtgtggaccgacctacccttgcctcgttgcgtgctctcacttgcttgcctgcttgctaccgaggttccccccagcttggcctcgccagtgaacctccctgctcagaccgcctcgtcgttccggagatcccaaccaaggtcgtcaacctcggatcgatcacatcttcctctagacatttgacctcgcccgtcaattcgtgctcttcttttcttcttgttcagccaccaccccccacccacctacccacctacagatagtttattagaggacgatcgagatggcccccgtgagttgagggagagaaacagacggcggcacgaacgaaggacgggacgacgacaagcatagcgggagttggagctggaaaggtcgacgaaatgctagggaaagcatggggacagtgaggaagaggaaagtttcgtcagcgcaacagcgagtcagagggcaataggaggaggatcatcacgatacgacaagacggatcgataagcgactacgatggagggaggggatcgatcagtgtcccgagtgagatggatggcgacactcggatgaccattagcatctcgaatcgactactcgttcggggggtcacccatactgtcttggtatcacaatggagccgccagcatacaacaaagaagaagcaggagcgatctcgccatcatgacgctcaatgctgaacgtgatatcattcgcaatctgatcaatcacctacacggagcactactctgggtagcaggtcgataacctggacgacctgaacctcaattcggctagcccatcaatccttctattcggggacgacaagcacaacaaatcgaacgacaacctcgccaaacgctcctctattgccctcacatgacgaaacttctttctttctcccactctgtcatgctttctccgacccatcttcctctgcccgacttcttactctcgctactcggctcgtcctgtcccgcttcgccgtcctcgcatgtctatcgcgagccagcattatactgacctacatcgtcgcgttcccgccccgcaggctcaagccccctctaccttcaagcgtttcgtcgaggtcggacgtgtcgtcttggtcaacgaaggaccttcggccggcaagctcgccgtcattgccgagatcatcgaccacaacagggtgagtctagcaactggctggatgcagaggcgtctatccgacgagtgatgtagactaaccccgtttttaaatgttccctgcttcacaggccctgatcgacggacccaactcttcggtcccccgtcaagccatcgcctaccgtcacctcatcctcaccccttacaccatccccgccctcccccgtgctgccggcaccggtgccatcaggaaggcctttgaaaagtctcaggtcggagacaagtggcaggcgtcgtcgtgggccaagaagctcgccgctagggatgccaggaagaagagcaccgatttcgagaggttcgaggtcggactcttgaagaggcagaggagggatctcgtgagtgtcatcccatcacatactcgaccgtccttcgacgcggcgtatcgtcgtcatgcatacggaagctgagacgagcctctgctttttcccgatctgataggtccgcaaggcttacgccaaggagaagaaggcttccgcttaaatgcgagaatgatccagactttttcttatagttgctgtttgtcgagagacgagatgtagagacggaccaaggggatgaagtgtccgtcgggcggtccttcccgccgtgagatgccccgggggaataccataacaatcaatatgtttcccctcttttccatcgcgcgtttggcaggttcctggattgcgcttgatagctgtggagacgacggtcgtatggtcgacgtctcgaggtgtgtgattggggcgctggagctgatgtccacgttggcggaccgtttcggtgacgttgcgcaatacaaaggtaggtcctgccaacgctaggctcgccgtcttttcgcttggttatcccgactgggtcccgaaatctctcagacgactgtccgccttggagtcacgtcagatacgcgagagatgcggtagggacctgagctcgcttccgaccgatacggaacgcctcgccctgttcaatcgcacgcacgtccgccaggcgacttgaccagcacgattcggtatcagcagactggccgtattgtcaagggcgactgctacctgtctgaagctcatactcgcccatgatagccttgttctcgcaaagacgccgtcactcgcaataacaagatgaaacaccaactcgcgatctttggcgtcgcggggaccagcatcgcgcggatgagcaactgaagtttggagcgacccgtgccatcacgagctgataatcccgctacagtcgatggaaaggttcgacctgggacgcttgacgtacggttctgatcaaaacgtgctcaatgtgatgatggagcggagacgaaaactctggttgaccttttcggccatgatctctaacaacaagcgcggcttttgatcagattgaggactgccccaaacatccgaggcgacttgcgacgagcgcgatggctgtcctcccattgcttcccgctcctctgttgcaggcttcggatggcatacgtgttcgaggatagtcgaatcaatttgccattcccgccaatccaatcgcataacaagatcatggcgtgtatcgatataggttacacgatcagctggaatcgtgtgaaatcggctcgaccaggtgcgacataaagcttgttcataaccggcttctatctttgtggcggtggtagtcgtgtctcgtgtcgaacagctttgcactgaatttttgtcatgcttcttgcgaattgatgtgatgcccttgcagggttgcggcggaaagcatccctttcactccctgagtgaacaagaacccttgtcagcgtgaagtgggatatactactacccctccaccaagagatgttgacagacgggatatctcgttgcggtgctctaaattggagtagcacagggcagacttctcgagatactcatagccgtcaacggcgtggcttttcgggtggatggaaactcgataccaaatcgaccatgatctgaggcaaccattcgcgcctcgccgtcctgttcggaccttcaagacccgctcgctcgtaacttcaaggacaaagaggacgatccaaacatgatgctacacgtgatctcatctatgctgcgagtatgttatacaacgccgacaaggctcttcacctcatcccctgtgcggctgcgccctgcttcctcatcctctcttcccgttccttttcgaacgcgtcccaagcttccctattatcgacccatctttcctggacatccattaccccgctcaaccctgtcaagccttgtaaagcatgccccatatgttgagagggagtcacacctgtagcagcgtctgacgggtcgacgatgatctcatcctcgtcctcgtcctcgtcgaccggttgtacgtgggctcccttgggagggatatacgcgtacccgatggccttgtcgagcagacgtaacagctggagcatcgagcgtttgtcctacagtcgaggtatcaaggaaacgaatagaggtcaaagtcggttggatcagcatccccgggtttcctctgagcacctgattcggcgccctctgcctggcgcagactcacctcgacggctagcgtttcgaacccaaccaacccgtaatcctctacgaggtcgcagatgaccttgttcagtttgacgtatttctcacccgcccggtcgttcatcagggatccggctaggtagccgagatcctgcacttcggtatagtattccaagttgaacgctgtggtcgaatcgagtcgagcacgggggagagggatcgtcagaataatcactctggttcagactgacgtgccgtccgagggaagactcacgaagatcgccatacttggtgacgaggtccatcttgctcaggacgttgacgtgtgggagttccagctggagcatggcccggagcgcgaggaggaggaccgagatgtatttggaagcgtcggtaatataatgagcgtcggacaggtggacggctactatctacggcggaggacgagaggagacgagacgggacgtgagtgcacagccgctaaagtgggaatggtgtacggcgcgagatcaagactgacccggtaatccatcttggtcaacctcgtgacgatcctcttcaagctctcgtgatttgtccacaattccacctgccccggagtatctatcacgaaatacgccggacccctcccttgcttcctattgctctctatcagcgtttccaacccctcttgtaaccaatcaaagttggcctcgaggtattccatagcgtagagcatggccccgttcggtccgagttggttgtcatgcatgatctcttccagggagatgagatcgttcaggttaagtgcgcaggggtaaggagggtcaggtacagcggggtcgaggttgatgatcgccacgggtcgatcgagggcggtgaggaactgcaggtgagtcgcggtatgccgctcggtcgttagtaacatgtcgatgagcacctccgggtcgctcgaggggacgccgatgacgacgagacagggtgggagagactcgcctgatgcatcccatgacaataggtcgtcttacccgctcctggtggtccggtcacgagctgagcaaacgccgccatcgtctcgtatccgtcaaagttgcttgatgactgctaatggtatgcggtcgtctagatcgttcttccttgctgtatgactatgtaatcttggaggatatgtcgagggctcactggagatgaaggcggtggtctccttagcttctgaataaatgcagacatgtcttgatgtcgacaaaggtttcgtcatgagacggccggcgaggaccgaaatctcgaaaagggacgtgcggacattgaaaaatggtcacaacgcaagctgatggtgatggtttaggaccaggttcgacttgtgtgcaaagatcactcgagtatcatcagtagtggagccaaatctagcttgatacatggtcggtactgctagtcagacgtcccccccccccatcctaggtgtaggcgatctgtaattgatgacccctgaccctgaccatgaccatgaccatgaccacgagtccaagttgatgtccgtgtgtgtgtgttttcaatcaaaagtcgcgtcaaacgcgttcagacgcgacttgcgcgacttgattgacatcgacgtcagttgattgattgaatatatcatcgatcatcgttgatggggatgtgatggtcgatcatctacacccttggactaggtctgcaagacctgacccggcaccaacgccgaatctcagtggctgcccgtcatgtcctcccctcccgcctctcctgatcgaggcctaccgacaccgacctcgcccgccgctcccaatcgacacgacaacctgtccatctttacacccgtcaaacgcaataccgccaaccccctcttcctcccctctccaagctcgacggcgaccccttcaccggccaaaagacctcggttggatttcggtcgagatcagaacacacaggctggaccttctagacgtcctccggacctcattcgtgagacggtcgaagcaccacctgacgacctcttggccctctttgacgatgacgacgacgatgatgaccggtctgaccatggtctcaatcgaggtaacatgaccatccagcacgggacggaagaaggtggtttgaatgggagcgccatggatccgtactcgatgggcaacggttcgggagccttgatcggtcgagatctgggagtcggggtggatggcgatgcggacgatcccggtgcaggggaaaagaaacggaggatcatgcccaagatggatcacgataggtgagtcagaggttcgtcttcgaatttcccgaccatggcggattcgatttctgaatcgatcgatcaatcgtcgactggcactcgcaggttgttggataagaacgggttcccggctctcatacaggaagccaagcggttcaagatcaagggtaaaggccacgaggtgagcccgtccttcttccctctgcctcattcgtatccgcctcccgcatactcaccgatcgacctgctctacggatctctctgacgacgaacaggcggcagacctgtccaacctgctcgaaatgtaccgtctctgggctcacaagatgtatcccaagatgacctttggggacacggtcaccaaggtagaatccctctgtcacagccggttgatgagcgtgagtctcgggccgctcgctacggaagagcttgcaagtcggctcgatcgctcattttacctgcgatggcaatgttgatagagcacgctcggtcggtacaaggaggaagcgaaacgggaagcggaggaaagggatcgaccggtcatcccgctcgagctagacactgccgactttgatccgagggttaggtctcgatcggggagtgtagacgagcaagatcaagatggggaccgtacgaggacccggtcgatcccgcgagacctgcaggacaatcctttcctctcccctcgatcgagagccaggctagctctggatcgagcgagacatctgggagtggacgtcggtgccgggtcggtcggatcggcgcaagaggacgacgagatggacctggacgccgtgatcgctgcggccgaggcagaggcgcaggacttggcgggcccatcgcttcaagagtcgcgggtcacaacatggccggacaagggcaaggcgagggaggaaccgatcgtcgattctggttacgacattccgccgggattcgacgacgacgaagacgactgggcggcgttggatggcatgtaatgcgatgcaaaggatccggatgccattacaccattataatcataatgcgggcggtgcccgtacaacgtggttctccctctgccgcttgaggtgaagtgatcgctgcgcctgtcgaccagacctttccctcaaatcaaggcaatcttgcttcgcttgaccccgcctcgccaatttcgcaacccgcctgcctttttcgtcgcttgatttcgctgtagcctcgaatacgctgtcaacaagtgcgccggcaaaaggggcaatgtgggaggcgctttccacggttcagtcggaggagacttggctcgcgccttgttcccggccgacgcgttcgtctctgccgtcgtgtcgtcttcgtccgctttaggttcggggctggtcaccatcttttccgcctcgctcggttcgtcgtcaacctcgtcgtccttcttttcgtccacttgcatcaggtcgacctgtgagtcttcctgcgcctcgacccggatcggttccggtgcgccgagcacgtcgatcctcttgacccccgccgcggcgtccctgatttcgagcgcggcgacacataacgatcggaccgactcgaacgccaggaaaccgagcacatccatgacgtcttcgttgggtttcaggtcgagataggtcgtcgtgttcagaaagtctcggaatcgtttggctgtgacgtcggtggcaggcatcagtgtcggatgtgtcgaacgagctagggagaacaaggagacctgccttttcgataggtgaacgatgcttgtcgacattccgagtaaaacacgtattgctccttggacatccgtctcgtcactgaatccgcttcctaacgagattccaatgtctcagcgtccgggtcgactttgggtgagaacacctcgaactcaccctcaatcgctgcaagctgtcttcgtacgcctcgagctcgtcatcgtcttcttcctcgtcagcgaccgctccgttctgtcgaccgggaaggttcttgagtacctcggcgaatggggtcagcggttcccagggcaacttgatgacctcttttcggggtgcctttttctctacgatgcaccgatcatctcgagcttagccgccgggccggtcgacgacgagacttgccccgaaccagactcaccgacgagatcatcctccaggtcctcgatctctacatcggcacctccctttgtcgcactgctttcttcctttctcgccgtctttctgacttccttccaggacaggtacgtgcggagcctgttgaccctcgctcggtcgtcccggatgagatagatgacgtcctcgatggtcaggtaacgggcgttacggagataagagatcatgcgtgctcgggtggcctgcagaaagtttcggacatgattccaggtcagagatgcaggggtcgacaagaggcattcaggggcttacgagctcgatcatctggcttcgcaccatatcctcgatcaggttgaccgtctccatcgccgggctctgaatctcgccaaacacatagacctgggggatgatcaccgtgtaatgagcccccctggcttctccttgttcgatctggaccagcacctcggagcgactgaccatctgggcaatctcggcgtgatacttgtactcgaccggtcctcctactgggatatccaccacggccccacctttcacgcctacctttttcttgcctccctgtgcgtcgttatcctcaccaccggatccttcgtcattgttgttggtagcgggattgccaacctggacgtcgtccccgttgagagagccaccggccgagggtcttcgttttcgagctccccgtttagacggggacggtttgggagcgccgggtcgttgagtctgaagaaacgcggacatgatacgcacacacaagctcccccatttgcttctgagatccgcttcgtcggccgcagaggtacctctcaaagctagagatgttatggataaagacgtccttgtcccagccaagtcgggtcggtttgtttgaattctgcttgtttccaccgcaaagactgtgatgaatccatggagaccccggaaagacgtttcaggatcgggggagggggaaaccgtgtctcatgaacggaggtgggggggagaaacaacgaatatgtcatcagacctgcatgagatcaagcaagactctaacgtatatgatgaacaagcagatgcgtgtacatgcgcatgatccatgtgtagtgcacgtctaatctaccgggaaactggtatagcgcgcgataccgtcccgccactcagtgatcggtaggccgggctaccccgctcgtgagttacttgcctcccaggaagggcagagattccacaggaggtcctccagggttcgtgtgaccagtaacctcagcggtctgtacagcgtcgtcctggatcgtcggatctccgtcctccctacccccacctggcccggccccgtgtggcccgtgacgcctctcgtgatcttgcatgaacctcttggcgggcttcttctcgatccctagttgtttacccatatccgggatgccggtataggtggcatcagggaggtttgccgtgtaggtggtcgtcgtcccgtttatcatccccgtgatcgtctgcgccttggcggaggaagccggatcgtcgacaggggcggccgaggtgtagatcgtgatcgtagtcaaggtcgtcaagaccgagaaaagaatggaagatcgcatgcttgtccggaaggtattcagaatttcgagatttatcagttgttacaggttgaattgtttgtctttgcgatcaacaattacaacgtcgcactcatgttgtgggcctatgcccgcacatatatatctcccgtgcaatctctgtgaccccaaaacgcttttctatgcctgtccttcttggcccttgccccttgttcgattcctttgaacccttgaagcccaggacgagttgtaaaaaggaacaacgtatggaacgatctgggtgcatgtttcgttgacgattggagcatgacacgtcattggttgattaatttgataaacgtgtcgatgaaggatgccgtcatatcccatcctcaatcgtgctgaatgccggcatcatcatttcgatcggtcgcgcgcgcgcgttttcggaatcaaatgattcaaagaatcaaagaaacgtcgttcactttcgaaaatcaaagtgttcatcgaaatatgatgaacagccagacgataacgacaaagcctcccaacaacctcccttcctcaggcttaggaccaccaccctgtacatcgtatcgagttcgtcatgtccgttactgcccgacgattagcacgtctctccaccggtctcgccacgactgtgacccagaggacgaccccggccgcctcttgtcgactcttgcgcacgtccagctcgatcgtcccctcggcccgaacatgcaagatcgccacactggaaaactcgtccatcgtccctcgacgacgaggttacgcttcctcggctgctgctgtcaaagaggctgaagaggatgccgagccgcctaaatggcccgaacgggtcttgcccgagatcacggcgaaagacgtcaagcgattgagtcgacagaggaacatcggaatgtgagcccttcccccccccccctcctcaaccgcttgtcgatccctcttcctccctgcctatacggctcggcatacgctgaacctttacctctgttacgatgcgtgacacagctcggcgcatatcgattcgggaaagactaccctcaccgaacgagtcctcttctacaccggccggatccgggacattcacgaagtcagaggtagggacgccgtcggtgccaagatggactctatggagctcgaacgtgaaaagggtatcaccatccaatccgcggcgaccttttgtgattgggaggccaacgtacctcctggtgagaaagccacgggtggacagaacgaagaggcatggaagaagcgtgacaaggagagttacgcgattaatatcatcgataccccgggacacgtggatttcaccatcgaagtcgagagggcgttgagggtgttagatggtgccgtcttggtcttgtgcgctgtcagcggtgttcaggtgagtcccatgacgatgtgccgaggcttcaacggggagataggggaaagctcacatccgcgatgggatcactcgggttcagtcgcaaacgatcaccgtcgatcgacagatgaagcgttacaacgtcccccgagtgtgctttatcaacaagatggatcggtaagtcgaggtgacgcattctcgccctcttgtccatactatgagatggctcactacaacccccactgatgaatcgcgggcagagccggttccaaccccttccgtgtcatcaaccagctccgaaccaagctgaggatgaacgctgcggcagtccaggtccccatcgggagcgaggacaatttgaagggagtcgtcgacctggtcaggatgaaggccatctacaacgagggtgtcaaggggtgagtcgggccgacgatgttgtcgacttgctggtcactcgcgtgccatcgctcatacccggtacttctacatgcccgcagagtcgacgtcagagagacggacgagatcccggccgacatcaaagaactcgtcgatgagaagcgagccgagcttatcgagcacattgccgagggcgacgacgcgtttgccgacctctttttgaacgagatgccgatcagcgaattcgatatcgcttctgccatccgtcgggccaccgtcgcgctcaaatttaccccggtctttgtcgggtccgcttacaagaacacgggtgttcagcccctcttggacggcgtgtgttcttaccttccggacccctccgaggtccccgcccaggccttggataccacccttcctgccaacgctcctcctgtccctctcgccccggctaccgtcgccccgctcgtcggactcgccttcaagctcgaggaaggcagatacggtcagttgacctacctgagggtgtatcagggcaccttgaaacgaggcggcttgatctacaacgccaggacggggaaaaaggtcaaggtgcctaggttggtgaggatgcacagtgacgagatggaggacgtcgagagcatcggggccggagagatttgcgccatgttcggggtggagtgttcgtcgggagatacctttaccgatgggacgtccaacttttcgatggtgagtcgagagagacgcatgcgacgagtgtttctgaaacaagagtcgatggcttatgtctcttcttgtgcggatgacccagacctcgatgtacgtgcccgagcccgtcatctcgctgtcgatccgacccgaaggcaacgagacgcccaacttttcccgggcgctcaaccgtttccaaaaggaggaccccactttcagggtccacgtcgactccgaatcccaagagaccatcatctcgggaatgggagagttgcacttggacatttacgtcgagcgaatgaagcgtgaatacaatgtcgcctgcgttaccggaaaaccccgagtcgcgttcagggagaccatcaccgagtctgccaagtttgattacatccacaagaagcagagtggaggtgccggtcagttcggaaaggtcaagggatccatcgagcccatggagcccgatgaggataccggcaaggacacggcgtttgagaaccgtattatcggaggaaacatccccaaccagtacattcccgccatcgaaaaggtgagagtcagcatggtgtgctttcctttagacgaggtgacgctgattccttcccgcgtttttttttgggggacttgacgctcgttagggattcaacgaagctctcggacgaggtttccttaccggtcactcgatcaacgggtgtcgtttcatcttggaggatggagctgcgcacgttcaagattcgtcagaattggctttcaggctcgccgctctcggtgcattcagggaggcattcaacaaggccaagccggtcatcttggagcccatcatggccgtagaggttgttgcgcccgtagagtttcagggtgagtggtggcgcttacacgatgcgtgataggtcgaatcgaggttgaccgacgtcatttacgccgtataggtaccgtcattggtgcattgaaccagaggcgagggaccattgtcgacaccgaggtccgagatgatgagttcacattgaccgccgaggtcgcgttgaacgacatgttcgggtactcgagtcagttgcgaggaatgacgcagggcaagggtcagtagagccggacgcatctcagcgtttcaatttgacccggggcagcagctcatttatttgtcacgctactgcaggtgaattcaccatggaatacaagacgcacgcgcccgttctgcccaacatccaaaaggatatggtcgaggcctaccgaaagaaacagctgggcaacagtaaataagccttcggcaatacagacgacccacagagccatccttgtattgtacgggagaccctacccgatagaccgcgccaatccacctctcttgacgaccttatgaacgcttcgacttgcatgtactcagagtagcataggcatgatatcaggaatttcatgcatcatattttgcggatacaactgtggtctctgcgcggcttttcgatgctcttattctcaagccttttctcgcttgacctctttcaaagcgtctacatcgtcgtctgctttccgtttgacccctgcgctggtcgtcgattctgtcgaactttcacggagttgcgtgacggccgtattaagtcgatccgctgcttgaaggacggccgtcgacggtttcacatcggtatcttcggtcacgatcttggtaggtactgccgggcttgggttgggtacaggcgtgcctcctttgacggatctaggcgaattcttgggggccagactactgcttccaggctgtggcgtattgcctcgactacgagccggactgttcgctcggagcccgttcttcccttcagtgttggcaatcacgcgattcgccactgccgtcgccacggcgtcggatcgacacgtcgcatgtgatatctgaaaccgcgcgacatttgaatattcagatctatcgatcgatcgacccagactgttcgaccctgtttgcgtagcagcccaacgtacctgtccatcggcctcgatcgcattcatccaaatccactcttcctcatcttcgttgtactcgctcacaaacttttctttacagatcggacacggcaaggcagcttttgcgggatcggacgggacgggtatccacgagctttgcaactcggcccgctgtttggctacaaacgcggcgtccactttgggagccataccgagcccaggcttgttgacgctcggacccgacgaactggcaccatcggcagagacgatgttggacgtgacgtccttgatccagaattcggctcggggcaaccatcgacgattggcacctcgaccttcgttttccctttccttgcggttccgtctaaagtgccagtcgaggtgaccttgcaggcggtctttgccggcgggacccgctgggaatcgtgcggcgcattgagaacacctgttgggcaagtgggccgtcggttgaaagtcgtagatcctgccggggaggacgagagaacttgcgatcgtcagtccgctacgcgtgagtctccttgcgctccggggcgccccactcacttgttcagatcgctcaacgtcaatccgacattcatgctcagtaccatctcttcatactctttcaatccgtccggctcgtctggcgaatctccaatctcgctcccatcgttccttcctgccagactcgctacactcgccacgctcccctctctgacgtgcgcccgctgtagcacgggcggcgtctgtaccggggtcgacgtgctcgaaccgatcacgcctgcaaacgtcaagtctctcaacaagttgccgaaatccatcttgggcgggggtacgctatgggacgaggttgtgggcgtggacccgtttcgagcgtgaccgggttgaaatccatgctgcggaggcgtctcgcctcttgtcaccgcgtacgggtcactagcgatgtttacaaggggcacgttggggtatgactcgccgagcggggttggtcgacctggacctgcaggaagacggggttgtatttccggggtcgaccgaccgacggcgaagggaggtcgaggtgtaccctgatcgctcgctcggatggtatcgagttgagcctgaatctctcgaatctcttccggcttgacgttgcccgtcgcgaggagtcgttcgatctgggggaaccgagaccgacgacgaaaacgagtagcgtccctttgggtcagcgtcattgtcggaggaggaggttggtcccgcccacgggtgactcacctgctcgagcacgcctacatggaccctagcttctgcatctcccgggttcctagccagggcggtcctcttgctctgcaaagcctctgcgagcgaagaaacgaccctctgccttcccatcccgatcggatcgaggtaaccctgtccgccatgcccgtgcgccgtcccaaagatgcccgcctcgatctcttccctgacttcccgcccaaagagctcgaccccgcctaccccgccctgtctccatgtacgcagcatttcttccatcttggtcctcgtcccggcgtccaccacggaataggccgagagaaaggtcggggtgatgaaccggggaaagacgtgtgtggtgtaaggcgggccgacgttcttggagatcgaatccaagaggtagagtagtgggagtttccctccggaaggtgcctgtctcacaaagagagaggggtgggggtgggggtttggccgtaggtcgtgtcagtcgggtgtacatacgaaacccagacaacctcgcagcgccccctgcaacagcgactcaccgtattgatagctccctccaattcctcaccgacggcggtcatcccgttccaatcgttcctatcccttctttccatggccgcgatgctcagattctggatgatgggcctcgagttgaaagtcagcgtgttcagctgttggcggtaccattgtcgaaaggggtcgtgcaggtagacggattgcgattgtgcttgtgatggcggctgcgagggtacatggaccgggggttgagctcgagcttgtgggtgggtgcctaacgggtagccaggctgagggtgttggagatgaggttggggcacttgggcgtaagggtaaggaggcgcctggggataaccatacaaattcggctgtgcgccataattggggtatgccatcgtggtcgtgtgtgctacgattcgacgacgtagggaatcgtggagagatcagcttgaagctcgtttgtcctgctagacggcggtccaacctggatgccgtgtcacgtcgtgtcactcacctcgaaatccgactcgcttgttcgactagactgtcttttgatgtcttgctgctctgcaagctgaatcaacgtcaagctgatctcggggcgtgagagatgatcgtctttgcaggtacgagccgaaccgagccgagctgagccgagctgagctgtatgattatcagaagcggcaggtagattcgggcaagaagatggaagcagaagaaaagaaaaaaagagatgaaccctgtgtgaatgacaagatgtgtatcgaaagaggttcaattctggaagatgcacaagatgtgtttgtggaggtcgtgggtgtgtatagaggatgtggagatggatggatgtcgatgtgaagatgaacctttgtcgtttcccgagtgtggtagcctggtagcttggtagcttgtgagtgtgggtggtactttccaactatacattaccctaactactaccctactaccctactaccctactactaccctgctgctagtagtttcataaattgagcttcattactttttcagtttctaccatttcgaacgtcatgagcaggcgaacaagaaagaccaatcttgcaacaggcaacagctgcatctcgaccaacactcgcaactcggttctaacggaacagaccccacacacacccccacctctgctgtatctagtatcgggatcagcaaactaggttcactacctacccacacacacgcgcgcgtatcgtcgaacaagaggtccagaaggatccccctttcaaccaaacacccacgctcatcgtcgctcggttagcgaacagaccgacgagtcaggatgcccaaggtcagtagtcttgtagtaccctcgtgtcgacgaaatacctggaagaccccgagtgtagcgcaacagtggggacagcgcgagagctcatcttttctgccttgttcggtctttggcttgtcgcacgcactctagaacaagggaaaggtcagtaactctctcccacacttgcactgctgtatgatatgctcgagatacttacacatgaccatctccccctccccgcctcgcccatcatgccctcgtcctctacgcgatacgcatcccgataccgacgtttcccccatcacaccagggtggtaagaacaggagaagaggaaagaacgagaacgacgatgagaagcgagagttggtcttcaaggaggacggtcaaggtcagtagtcccttcatggcgtgccccccgacgtcgccccccgatcgaggatcaaaccggacctaacctgacctgacccgaccgtctcgccacccctctcggtctcgacagaatacgcccaagtcctcaagatgctcgggaacggtcgagtagaagcccaatgtttcgacgggaccaaacgactcgcccatatccgtggcaagatgaggaaaaaggtctggatcaaccagggtgatatcgtgctcttgtcgttgagggatttccaggacgacaaggccgacgtcatcgtcaaatacactccggatgaggtgagcagtcgtcgaccgtgacctatatctaaagagagagagggaagatggactgattgacactttccggttttctcgcgctcggcaggcacgtaatctgaaacaatacggtgaattgccggataccgtcaaggtcaacgagaacgagacggcctatggcgaggaatcaggggacgacgtcttgttcgaggaagacgagattgatgacatctaaacaggagggagagcgtgtgggcatggtggcatggagggacgggcgagggggacggacaagagagatggggcgaagaggggatgtagtctcccgtggatttcttttgtgccctcctccttcatcgagttggatcggatgtgcagattacattcccatcatcgatcgtctccgctcatgcctgacgaaacgttcatttttatccgttccttcgccgtcagtatgtcgtgctgccaaaaggggggggagcggcctctgccgcattacagagagacaggtagactagcgtgcccgtatggctcacgccttgacagcgtcgcgtatcaaataattacgacgtgcggtccgttcgtgtgcatccaaccacatccaaacacacattgcaacacagatccaatcacaaaacactcgcacatacacacaatctcaacattttcacgcaactcctctttggagcccagattttcttggttttgatctttgtcttcgatgccggcaggtgttttgcgtgattctcggttccctgtcctactgccccgagcttgactgtagtctacctctctgcaccgaccagggctccatccccttactatgttccgaaagaagaggcctcggacacacgtccaaagtccaacggtccatttgtgcagacatgtatatcggcggcctgtctccaattgccatcaagcaagatctcccctctctcacatctgtcgctcacagcgtagctcgcccacagtgcagcttcccagaacccctccggcgaatcttcactaccctgggtcgtctgatgttgtttctcctgcaataacgtcaaagcgctaccctgcggcaaacccgatacagacttcgggatgcggccatcaagtagaatcgagcccactttcatcctcgcagtagtgatcgctcttgataatgctgcagaagagctaaccagcgagacgactcacgagacaggcatggtttggattgagagccaatccccacggcaatcgttccaggcaggcgccgtagcatatttccttactcgtgcgtttgccgttccctcaatcgtcgcaatccctcctaacactaacactatacatatgcaaggtacgccttatcgttcaacatacccgtacactctcgatccgcattgggtcctactcatcggggatcggtgtcaagcccccttctccgtgttggtaaagtgaatccggtggcaaatggtagacctccccgtatcgcaccgtggtcccttttcgtgttcagcataacggcggtacacctcccgacgaggcgatgacgattacgatgtttcatagtacttcataccgcagtgttgagtggaaggaagcagtcaggaccgccacgcaaatcgattcgaacgatcccgcaaaagatcccgaggctgaaattgatctttgatgcaaaggccatgctcatcttcgttctatcgttccagtttcatctcaaagtagtgcagaccatggaggacgaactgaggaatccgatatctcgagtgtccagcgagcgattcgctattccctggtcgtcctggtcgcgccaaacaaaaatggttcgacccatcgatttcgcaaccccggcgggagttttgggtgcagccgcccggagaacgtatcacgacgttgcttttgctctggtctatctgggtccgatcagatgcagccttttagcgatcacaccgatcgcaagagggaagacggtcgcgaggctcggttaatccggcctgccatcgtgaggatccgacgtgtctctctcacgcggacagagggatgagattattgatactgcatgacctcgatagtgactgacaactatgatagtgcagcagataccagtcctcaagaaggtctgtattgtggacaacggtattcaatagcgacaaaggtgttccatgtgcgaatattattattttccagtaggcgccgctgatttcgaaaccccccttgaccacctctccggtttctagttcgaagagaatcgccaacacacaggtaatcctcgagaagccgcaacgttcagatcatgcggtaggaacactgtttaggatcggttcagattcaagtgtgacaggaccgacatgccgaggttccatctgaaacgcgtttcccttttcccttttctctcgattcgcgactttgtgacgcgtacccggggagacgagacgagacgagacgaggtggaggtagaggctacagaaaaagttgagacaaccaacacgatgacgtttacaactgcaactggcaactggctttatttagtttcaactacctactctcaagaatctagagcttatctgtcgacctaattgtgcttgttctcgaccgacagtctaaacctctcgtcatggccgtcagctataccgaggccatctcgcgcatcgctacatacctcgaggaacgcaacgccggtagttcgtcctcgacactggcgacgactgctgacgtacgactcgaaaaggctgtaggtcgagttttagctcgagattatgaagcgacgatcaatgctccaccttttgacaactctggtgaggtatgacgggtccattcgcggcgagccatgtccttgctaataaagtctcgccgttcggaccttagcgatggacggatacgccctctcgtcgagcaagaccaccctggcttccccgaccaaccccttgacgtttcgagtgtcgggctccatagccgctggggattccccactgaccctggaggacgacgattcgatgacgtgttacgagatcatgacgggagctgcctttcccctgtcgactggatacgatgcgtgcgtgcggcacgaagccgtcacctaccagccacaagccgaaatggaagccggatcatcgtgtacgtcattccctcgagccaggaccataacgatacacgagcctataccctcgaggtcgaaccgcaagttggcgggtgaagatttccggcagggtgacgtcttggcgagagcgggcacgatcgtcactcctgggattgtcatggtgctatcctctactgggatcgaccgagtacaggtggagcccgagcgtggaaccaggatggcgcggaagcagcgtctacggataggcatcttgacgacggggaaagaggtcgccaacaatcacagcctgtctactgggtctgcttccccggcaacaagttctcacgaaccgggatcggcaaccatcatcccgaatctacaaaaaggccacatcttcaattcgaacgcgccttacctcgtctcaacgttggattgctggggtcacgatccagtggtcatccccgcgcccacagaagatacccccaaggcctttcaagagagactacgggccgccgtcgcggacccctcggccccgctcgacctgatcgtcacgaccggaggcgtatcagctggcaagcacgactatgtcccctcgtcggtcatcgatctcggtggacggatcgttttccacaagacgatcatccgaccgggattccccgtcatgttcggggagatccctcgggatgctccgggcaaggacgacgaggtcccgatctttggcttgccggggaacccgatcgccgtggccgcttgcctcaggttcttggtcgctgcctttttacgagaatccgctggtccaacgtctaccctcccaggcgttcgagtggcccggctgttatcccccgacttttcggcaagccgaggtggtccacccgcaacggccgggtgtggtgtggaaaagatggctcgaaacgtgacagggcagacggaacaccgggcgaggtatcacaagaaaccgttgatgacccggtgtttcctcccgtctagaatacatcaacgtcgaccagagggcgccgtcgacatggacggccccggggaaaatattccagggttgaacatgctgccttgggtcgaaccactcactcggtcggcctcgttgacaaaggccatgagcgaggcaaactgctgggtcgtcctgcccgagggcagagagatctttgaaccaggcgagattgtcgaaatcgtcagtatgcgcccggaataggcggcacgcgacatgttcagatgcatcacttcgtatatgcgggtgtgcgacccgaaaaaaagtcaagtagctagctaatacaacgctggctggtataatatgatcatcatggatgggtggggaaaacgtcgcacccaaaagcgagaatgtccacagagtggcgaacgttcgaaaaagttgcggaatccgagacgtgtacagattcgttctagagcgaaaaggcgaaggttttgaatagcgaattgtccatttctttctctcccgcgggctttggcgcagaggaaatcagtcttggtgcgaatcgtgttttgtagccacacccggcggggctcgggcaattcaatatgttgatcgtgaggtggtcgttaatgctggctccgaaaaataggtcgtgtatgtttctcggggctcgtcggtaggatcgtgacccggctttttttcgtgtattataaagcgggtatcggtgccgacggcgtgccagaagagctgtgtgtggaagagtcgagtgtacgtgtgtgtttgtgtgctgtagcattccggtggacaggcgggtcgagcgggtcgtggtgtcagttccagaccgcttgtgggcaaattgtgcagcgatgacggtcagctcggacggcagcgtgtatggccgccgagcctcgatcatgacggcgcggtccgttctgtgtatcttgttcgagtgttttgtgtttgattggggggggggggggtgtaccgctcgtccagtgcgtgtatattgcgggacgataggggagaggcattgcctcaggatgtgggtgcaggtgaatcgtcatctgcccgtagccacttgtcccatgcgacgtcgacgggggtggtcccctctgagccgggcgtgggcaaggtccacttgtccgggttcatgaacgacgaagtcgcgcgttgcaacatggtcggtcgcgtcttgcccatcatttcgtcgacgagcccgagtccgagacccgaggacgtttgaaaatgctgagagaaggcgtgagcgccgttgtccgcagcgttggccggggaagacacttcgacggcgtccctggggtcatcgggcgtgctgatcatttctcctcctaacccaaagctgggcaagagaccgggcgtggcggcatcgtacccgaagtccctggcatacgacttggccgacgaggatggggacccggaagctcgaggagactctttatagtcttcctcgaagcccatgtgcctttgtgaggaggagactggagtgctcatctcggccatgaccaggcttgcacctgccatcaatccggacgaaccgcccgtcagcccctcatgggtccgacaactcaagctggccgccgtcaaactggtcaacccggcgctgctcgtcgtccctagaacggcgtctgcctgagaattctgcctggcccgtccgtgctgagcgtgttgttgatgatgatgttgttgtggtggttgctgttggtgctcgaccatgtagaccggggacgattggctaggcaaggcgatggacaagtgagaggccgagacgaacgcgagcgagttgctcgacggagtcggctgcatcgtcggtctcgtcgatctcgctgtcatgttggtcatggtcaacgtaggggagacccactgcctggctccgcccgacgatccagagatcgaccccgagctcgacccggtcatggccctccttctcatcctcctctcctcgatcgcgcctcgattggcaggaggttgactcagattgaagccagtactggacccggtgatcgaacctccggaagatcctgcagagctagacatgcccatgctcttcctccccacggcctgaccaaagttcaacccacccttgttggttcccgtagcgtctagattattgttcatctcctcgaacggcgtcggcacgaatgccaacccgggggtgatcaacgggctgatatagtgacccgcatcgatctcgccgtgatcgcgaagatgatgaagatgactctcggcctcgtcatcagagacgaccttggaccctcgtctcgacccgacctgctggtggtggagttgccgatgatcaaccgccgagccggatctccgtccgaccacctcgtccaccttgcctctgggtgtgggcaccgcctcgaccctgccctgctcgagtgacattctcaggacctttctccgacgttccaacaacccgggctcttccgtatacctcctcttcctccccctgatgacctgatcctgccgatcgtcccgctccgaggcgtgctgcgtctcgtcggcgttgtcttcttgtcgaaggaggacgaaccctgggttgacgccccctatgtaccgtttatacccttccaaataccaggccgtcaagtgctccttgtcccgctcggccagggccttcaaatcggtgtacatcttgccctgcgcccctgctgcaggtgccgagggtcgcgccgtcgtggtcgtcgtggtcggcttgactggcgacttgtgacagcgtacaggcacatcgacctcgacctcgacctcgcccgcctttgagctggacctcgccccgccgggcaggatggggaacgatcccaatccggcccccgagatctcttccttcaagatcgatgacaagtgggtggacaaggaggcgtggtaagatttcaagctcgggcgggagagagcggccgccgtcaccgtcgtcgatggcgttgttgttgatgttgacgaggaaacgggtgctaccgctcgtgatcgagtatcgacctgggacatggtaccgacatccatctgatccgctcgttgtcctgtacgggacgatgggacctggtgggaatgagagaaagatctcaaagacgagacaggggtaatgtcgaacgaggatcggtccgagttggatggcgttcgtatccgaatggaggtgtcgtaaagggatgtgatgcgatactgaggatccgaggacgagtataaacaaagttcaagcaagagggatgagccacctcgttcgttgacgtatcaaaggaggacggctacgactcaccgagagccgagttccgggtctaatgacagggcggatcctttgttacgaaaacaaacggacggttccaggtgagattctccgttttcgtcagagtggtccaggaatttgagagagataccgaaacagatcgctggattcgttctcgagagtgggaatgagagtgggaataggaatgggaatggcgagggggtacgtatctcccagagtagtaaggcgttgaagggtcaagtaggtccgagagggacgagcgatggacgacgtggaggatcgacgacgaatgataaatggacgaccggggcgatcggggcacgcagcggaagggggaccggcagcggcgttgagatgatgcccgggttcgagtcgtgcagagtagtgctagtgagtagtgtctagtgtgaattcctgattcttccgtcgtatcgtgctgttgtcgggggcgattgggtttcggggccggaggagaaggggggtagtctcggaggacgagcaaagcggggcgaaatagagagagacgagagatgaggactaggacgagaaatgacgaggcagtaacagtgtgatggtggtaatcgagatgcgtgaatgtgagataaatctttccgtaagaggtttgaccagagacacactttgggccagcggtcaccaggtcatcccatcccatcccattccttgtccatgccccgcctttgatcgggtttgattatgatttccttcctctctcgcttcgagagggagagagagacagggagacacggacggaatcacttgcagtcagtcgcatggtgtgctgctgctggttcacattttcgataaaaccccgcagccaccccaccacccaccgaggacagacaaacaccgtccttcgtctgtctcgctcgtgccgcgcccgatcgtcactcgaggacgcttcgaatcgaccaccagtgaaccaaaacacacacacacacacacacacacacacacacacgagccccgctgtcgctgctacgctaccaccaccacagctgcgatgctgcttacgattgacccgtatcgggaaacgatccacgattagccggacccctgaatggacggccatttcgagattgatttcgagcgaactccatcaaagatcgacgacgacaaccacgacgaccgtagtgctgcccgaacgggatcactctggatagcggtcagtcacaactttgtcgctacccccctccctgactaccctcatcctgggtctttcgagggatcgccgccgagaggaccagtcaaagtcgccagtctcgagtcgtcgaggaccccccccccggttgcctcgttgattgaatcggaggattccaacgaaattccgccccgagccccccttcactctcgcctcgcctcgcctctctggcaaattactttcgctttcttccgcgttcccacgctcgtttcccatacccgaagacgccacacgccatccatcggtccatcggggcgcgggactcgcggaaagtggaggcacaaacgactgctgcttgctgctctaggcaattcacgatggagtggaggttcaggttcaggtttaggtccaaagccgcgcgtaagccgatgccgataaaacaagaggcgttttcgcacgtccatgtccccatgtccatttcgagcgttcccccccccccccggccctaggatttccgttctattcacgtcaatcttgttcaggagatggatcgcataccacatagaccgctgccgatcacttgttcgcttgttggttccgcagtcgcggcgacgacattgtttgatgaggtaagcaggtccagtcggtcgtcttcgaatcaaacttttgcgcttgcccggtaagatgtacaggtgtcggtgctcgaaacacgatagaacgtcttcggaggggatggtcatcgactcacacgtgctctccgagaacggaccggcgggtctgtctatagctgggggggagacacggcgggcaatacgagtggtacgacctcgagttggctttcgatgtggacttttcagtagaccgagttgcccgtcaaggatatcctaagcgccggacgaagaaagacatcgtgacctcagacacacgttctgtactcctattcggcaagtctattcaaggtccggtcctatcagagtgatcgagatccagcgcagggaagccaagtgttgttccgattcaccagctcgccaaacctcatcggtttcccaagcggacggcgaccgggacggcagccttatcgacggaaggtagtcatgacgtcccgaagagtcgtccctgacgcggctcggagctcctagttcccctctctgcgtttgcaagaagatcaccaacacaagccctcatcggggggaattgactggcagtcgaatagtgggataccattctcgtagcatcatttcgcgtctcgtgtggatcctcattgtacaccctcgttccaatcatgttcttgtccgtcgccttcgtcacttcggtttcagtccaataccatcgtcttcgctcgtcatcgtcacgaccagatcgagatcagtgaccggcatggagacgttcgtttttagttcaaatggatatgccatatttatcacacgtgcagaagactgcgccgtgccatgacggggtaccgtgagtcggaaaagtgccaaagtgcaagtccctactgtcatcgatccgacgacaactctccggatagctgcgtacctcgcagcatgccctgtgtttgcgcattgattcaggaagatcttcagtccgtaaaccttcgtcaaccacaaagtatcgtgcccgggttgtactcttgtaggctatggacgtgaacatgttcgagaccttctcgtcgacgttggacatcctcaaaaatctcaaacgaatcctgcagcagtcagaggagaacaagacggacggtcactggaagagtgagcttttgatgtgtctcggtcaagcttactatgcgaggtactccatgaatccaagaactcgagagatggtcgaacagaccccaagagagattgtgatcagttcagcgtcgcaacttgtacatttggaggaaatgtcgggattgtggacgaacggcgactagcagatcctttctgtactttggatgggtctcgccacagagcgcgggaatggcattattcgttatatcattattattattgtcggcatgacctcgaggaggctaaagctggtcacataaggggaaaaagagcctcgggaaagaaatgccacgtatagtaaactacagcccctgtgaacaggagaggagcagatatcctctacgtcgagcgaacgtcgcgcatccaagtccctcaaaaaggctgcgctggtcgtcaagcgcttgcgacccgggatagcgcctggttctggagacggatagggttctctaagtttaatcaatcgtagccctgtacgtgatcactatagcgaagcgaacgaaggcgggtattgcatgcaagacatcagcatcgagtttcggcaccaccgaccatagttttgcaagatgagcgcctgatgcttcgaaatacccctcgtgtcagaacgtgtatatttcttgtcgactaatcctttgcccactaaccccgctttgatgagaacactacgatttcaagatttgtgtgttaccagacgtgatgtctccctcacgtactccggaatgtgatccttggtgaaagcagcaggtcgcgatcggtgttgcgccgatatcttatcatgaaccgaggacagtctgtattgtaaggcttgccagcataatcaagaaacaaagcagagcaaactacctgaagcctttgcaagctgctcaagtggctaattgttcgctacaatgcctgcaaaaggcgccgggaaacatcttttgtcatccagcgtctctaacgtgcaatgacgtacgatatccttaaatggaggctctttccctgatacctcgatctgccccgatctaccccgagcagccgcggtcttcacaggactgtcgcacggtcctcaaggatcggatgaatccctgaaaattctaacatcgtaccagtctggtattccctggacaacatcgcacttgcacgaaaatagaacggcgggccttccgctcgcctgaacttgtcgatgcagcagactggcaaatgtatcctgaaacgcatgcggaccagaagattaatcgcaagtcggcttcggaaacccccagagaagttgcaaacaagggcgagtcccccttcgctctcgagaagtgggcggcttgaccagattcgaaaacacgaacggaacccctgacctaggctacaagatcgcgtgccaaatcgccactcgtaaaactgagctctcacgcttcagaatctccatcaaattcggatccaatcactaaccacatccgcatcgtcgaacgcttccatgtcgcacatacatcgaatcggacacagacgttcgggcgatcgagcgacaaaaatccatcttcatacaaagctcgtagaatgacatcgttaaaacatatctcggaaccgggtctgccgtctccgacgtcccgtcatgtcggcttttcctcatctccgagtagagttacaagctgaccctctgaagatttggttagctgagcgagatgtcggtgcggcatgccggtttagagcttcatggcatccgcatcgttttgagatttcagctcggccctatgatgacgaagcagggccggagtcagcggtttggcaaggcaaggattggaccgaggtggatgcgagctttgccgggccctttcgtcacgaggaggtcgcgcagcctgaaaccttgtcctcgaaagtctgggttctcgagtagcagcacaaaccggacgatcgcgacagggtggataaagagccagcggggaaagcttacctcaactgctgcacaaacggcggctccttgtcatcgtcgtcccagttatcctcccagagctgcgctcccacatcggtcccgctcgaacctgctccgttctgattgcccgccccgctcgtctgctgttgcgcttgcttggtcaagacagcgagagtcgtctgcgattcgtcccagtctgcaagagagagaggacctcagttccaaatggacgacaatgcgagtcggctagggtaaacgtgatcttcaccttcaacagggaattccttcgtgcagtaacgagattgtgtcagcttcttcagtcggaatacagctcaaccacaatgatcaatcgagactcacctcgaactcgtcatcttcctcgagtgctcccaattgctccaacggtcttgcttcagcggtcgtgccgttggccgtagccgttgtcgatggtcctgcttcggatgtgttagctgacatgtcgatggaatgcgttggcgtttaaagggagtgggcgtgatcgaccaccagctgtttagcatgtgggagctctcatcaagataggtaggtcgaggtcgtgacgaagcgtcgcgaatgtcgtaccggacatctcgatgtaatcatcgtgtccgtttgggtcgatcaaatcgaccatcatacacgtcgctcttgtctacccaaagaggcaagtctatgtgaaactgcccaaagaggtgaatctgatgtgatgacggtcgaacgcgcgagaagcaacaaaaggggcaaagggcgagaggaggagcaaaacaaaggaatacacgcgcgctagcaacctttggaagcaaaatatcgccactcatatataaggctacaatcgatttgcaagataatcaactcgcgggcggggttggcggagcgtttcatcgcaatcatcacaaacgatactgaatacatcggctggacaaccatcttcctcatccacaaacatcgacaaactgctccgaattcaacactctaccaaacccagtccttgtccctttcaacagggcttgaccggctgtcagaaaatcaaacggctggacacattttgccaaaagtttgcagtggcgtcaaattgacgactcgacgaacgcaaaagcataagcaatttggagaacagaaaagagatggacaactttgagagaatcatggacgagaccagagacgatcttccccctctgtagcatgttctttgtcttcccccctcacacacaaacgcacacacgcacacgcgcgcaagatcaattgggatcttgttcgcctcctcaggtgacaaggtcccttttgttgacgacgacggctcctcgagatcgagacacagagggatgcacgcatattgcccagacacagaccgaagcggtcagcgacccttgttttattgctaccggatggcttgggcttgtggatgaagaggcgaggctcgaatgctgtaatatgcttcgagtcctctcctttgataccggcccaggatgtccgggagtcatacggcacgggtcgctggattcgccaaagcagagccggaaagtataccaaacgctagacatctagggcaataagcgacgtattctctctgatcgagatcgacccgggggcagtcaaaagtataccgtcaacttgtggcaaacccatcgaaggctatcataagccaattgaagagagaaaagaagcaaagcaaaacaggtcagaacgttatcgcatgggggctccagtgcatcgagattgttctttcgtcaaaccgaaggacaacgctcagcatttaattcttttctcatcaaaaaaaaaacgtgtgtgcaggggggacagacgagagcagggcctacgggtatgtggcgttgccatcgttcaactcttgggtgactcggttcctattaccaagaagttagtatctcctttcacaatctcggtggtggttatacctctcgagagcgggtttattggccttttcgttttcctcttgtgcttttacgcaaaactcgtgggatgggggacgtcttctggaaaatcgtagctggtatccgggcacttcggtccagctcgatctcatcaaggacgccttcagaccacttcatcgccaaaagccgaccaacgtcgccagctccggctgcaacgcaaaccgaatcacaaacatcccggtaccgcgaggctatcggcgatccgagggcgaatgccactacgatatgcggttgaagacaacgagggcgcgcgattatgttgattattctggctagaatgtcagtaagcgatccttcgaatcgagcttctttcgctctccctcttccctcggattcggtttcccgtggggctgccgccgcgggatcgaactccattatctacccccctcttcccttatttgcacggagaatatcgttgactcaaccgagctttgatcttttcctgcaaaatctactacctccttcccatactcggacaacaaccatatcgaaaccctcgaacaacgacaaccccatatatatcgatggtatacgcacttgctcctcgacgctacacgaccgactagacagggagatcgatgtccggcaaaagagacgacctcaaccctctgcatcacaatctgatcagactggggacgatcggatcttgacacgcctcatcgatctcctcctttgcatacttccctacttgccgaggcaacgggggagatcactgggtgagagacgcttcgtctgtgaatctcatttgcgcgcggtatgtgagtcgggagtcgagaggcgatgcatcgaggcagggttatacgcaatcggttttcggcataggtatatagtcctccgctcgtcatcctgtaaaacgtctccctttccccttgttttgagttggcgtccagtacagccgctcctctcgctcccgtctcttcgagtgagcgggactgagtaggatcttttggaaagacgtcaatcatacatggggtctcgggacagagcggagatccagtttgccgcttttcattcattggaaattgtcggctggatccaatttgaagcccaggtcgattcgcttgcttgaccttacggggcgaagcaagcgatcgagcctgggctttttttttggccaaaatattttaataatacacgtcatcgcacaagttccggcctttcgattcaaagcttttgtttgatcggggtgggctcggcgaagttgtcccgccgtgtgaaaaacgcgtcccagatcgtggccacctccccgcaacaactgcggcgcactcgcttgttttccaaccagatccccatcacatgcacaccgcaacacccttgccgccggctcgcttcgaccatcgaccacgtcctctcgcacctctggcacccttttccttgacctacgtcgtctttctgcctcgatcagctgtgctagacatgtgattttgatgttttgacttgtctacacgcgaggcgcgatcgtgtatgctatcggttgggtaaggagatacaatttccgtcgccggtcatcatccagtttggatttcgctgtcgggccgtcagagtgtcttcgtctggacccatgaccttcctgctcgatcatgcagaaccggaccgttccctcaaccctgatcgaacgtccgcggtgtctgcaaatctcactctgctgcatgtgacaggggtcgccttgcggctgaacgttctaccagggtcgaaaccccgctcggacatgttcggtcgatcgcatctctgcgcgtggacccggaccggtgcagatccccctgaatcccggaggcaaggggtgaagatcgccgcgagcacgcaagtcgagagggagaaagggacggaagatcgcgtatggtccggattctcatttggccatatgccacatgacctcgagtcccagggcaaagcagcggcagtcccagcgtggtgacaagaccggcccatgtcggacgaacgagacccgtctctcgcggcacaaccctactagatagcgccgcgatttctccttgttgaacgcggtttcgctgttaccatttctccatcgcgcgagattcatcggccaaaaacaccgcgatctggtcgctttcaaccgacgcttatccgccgtgaagcctccgacgacgaggttgtgcggacgccattgggggtgaacagtcgattctcgtcgacagagtgaactcgatcaggcctcgtcgtcatgcgtcgttgaaagcgttgaacctatcgtagaccggccggaccatcctgggaacttgtctcgtgaccgttcggtctgtgcgtgacgtcgatgtgaattgaaggatctcgacttgcgaacgaatgtgcgtcctgatcgtcgtcggcgcaattctgcctaaccgctcgccaggtcgtcggagaccgggggcaatggaggtctgggtggacggctgtgcggtccgggaacatttgaccgtaagtgggaggggtagacagggacccgggttcgcgagggggagacggggattctagattgtcccatctgcatcttggtccgtcgtagtgcctgacaacggtggcctgtagccaagggctctagctatgtcaaacttgcgaacgaccgcagtaatgggcaaggaggaggaggatgatcgatcggtctattcgtcgtacgggtcgtaagatgtcatggtcggtcggtgatgatcgaccgcctgagagataccggccgaggtgggatgtgggagtcaagatgatgaagacttggctacctatgtcgggtatgttgattgcaggacgaggtgtgtgtgtctatgggatgacctgacctgttgacctgacctactgttgctgctgcttagggtccggtctctgctccgggtgacacgcgctcgggaacaatcaatggaggtggcactcgaagcgagacaacgaggtggttacccgcaacatccgtaactagcaaatacaatattactgccgacccgaacatgtgtctactacatctactgcgctactggaaacccaggtgtttagagttcgcatggtcgagatatcagaacgcactacagcaagtcggtattaacgagtcggcagtatcgtgtcaagccgataagcacgcaatcaaggctggaaaaaaaaggcgcacataacgtgcaaaaagtgatgatgactgtgagattcgaactcacgcccctttcatggggcgtgagtatggctgttcggcctaagatatgggacgcagaacgcatatgcattttagaatcccccccccctctttgtgcttgtcaccctaaagacttcgcggccggacgcgcgacacgctctcatctaactgtttacgtcatcgtggcaacaatgactccgcattaagcatccggcagccttcagcatccggagcgaggcagacctagcactgagattacatcgcctctcatcttcatctatcgatcttctgcgtcccacctgcctgaccgcctgtgtggccgcggtataaccaagcatccttctacaacattgaattacaccttcaatatgtcccagcctacccgtaacaacaaggttcaactgaccaagactgctactgagctctacgacaaggcatgtacccgcactacagtttcgccaagcagacctttcactccaactaaatatctctcttctctgctggtgaatagattcgagaagaacaagatcgtaccagcgcgatcagagttgagaaaggctacggtatctggtacaagcgcggcaaagagcgcaaggatcagccggtctccctctactccaacacgattaaaggcctccgtgttggcctcaagcacgatgctggctccaagcacgatgctgagctcaagcatgaccttcccatcttcgacatgatgatgggacgaggaggtgcaaaaggaatcccgccgagcttgatcaagggctggaacctcgcgctccaggcacagcttttgcattacatgaagcaggatatgaaagtccgtgctcagcagcaaaaggtgcgtgtctcattggtgaatatattcatttgggctcacgatgctaactgcgagatacttgtatcagctccaacaacagaggcagcagatctggaaggtggattgatgccgccgactccttgtattagcctcatactgatcaatccctctcagacccgtatcaagcaattgaaggacggcctgaagaagaagcgactcgacaagtcatgatgcaggtgcgtctcgatgctctctgtatcatactttatattcacccagagcatccctcacatagtgtccctcgaacccttgccaaactgttaaaggacgagacatatcacgatgctgtgcgccgcattgtagagacgtaaacatgatatgatgacaatctgactggagcaaccgccacaacaaacaaacgcgccccgtgaccatacaaagccagagtgatgaccgcgaacgcggtagacttagttcagtgactctgagagaagcgaccagcgacaaagcattgggatatgcaacgtgactattgcaagggttttaaatgtccagttccatgtcgtccgtattcctcttcgagaagcggctggcgccttggagatggtccgcctttgtatcggagaagcggctgctattgtagtgttcgaggccgtccgcgtttgataccgagaagcggctggcgtgttcgagctgatccgtgcatgcatgcgaaaaccggctgttgcggaggtgttcgcgcccgtcctcgtcccttttcgaagatcggctgaccgaattgaaatggtcgaagtcgtccacgttcctatccgtgctaacttccgatccgtcgatatccctaccgccctcagcaagcgcaaccatcccttctagtagtctaggcatccgccggagcgcgtcgatggtgcccggcatgtcaatttgtctgtaatgcaatgcagctccactcagcatcgaagcccgtcaagcccgtcggcaacgacgatgtgccggcactactacttacgaaacgttggccccttcagttctaccccggctccagcctttctcctcatccagtccagcccggtacatccgaggcactttgtttcgatgtgattgcttgatatgcgccgtcaatttccaaggcccaccgccacccctcatcttgtcgcagccattgcaccaagggcagcgatacagcttcttctcgccttcacctccaaagccctgcggtattgcacaagagcccgggtactttatactgagatatctccagagttgaaaaacggagctgtcgtggatggcgaaaacaaccaaagtcaaagaaaacacgcaatagctatgactcaagtacgactgacctgtgaagtcgcgttgccttgtgtttcgcgaccttgttaccctcgtaggtcaggtcactgagtgttcagcatggaggtcagtgccgcttcgccatcagctggaggcaaggcgaagagacagatcgatcggcttactcgtcaatcatcggatcggagacgcataagtcgcagatagcggtcggttccttcacggtacagatccgtttaaagaaagcgaactttacctcggcgagagctagaagcctttctcgaggtgacaatctcgtcttgacttccgcagctacaggctcaggtggtccatcctcgtcgacagtggccgctgagtgaggcgcttcattcacgttggcagaggcggcaccagaacgggaggcttcgccagtgccggtgcccggcgtttcgacagcacgatccacggtcgtgaactcgtcctcgtcatcctcgtcatcctcgtcatcttctacgataccatcgtcatcaggttcctcgacatcatcaacctcaaacaagatgtctccctcttcaccttcgggaagctggaaatcgacaagctcttcagcacagcgctcggaggcagtctgatccgcgaccaaatcgttgcacgcgtcgacgtagcgcttgcgcaagtcgtccgggatggcaggattcttcgttccattgtcacgatatcctgggatatgtgaggggtcctgagctttggtgattctctccaggtcggccggaattgtagagggacgctgtgcttgggcaatccgctcatcaagctcggcctgcacttcgagatgagcacgttgcttttggttgagagttcgagcgttgttctgccactccttgacaagtcgccggaagcgatgtcggcaaagaagtagaacccgtggcaaatcctcgggcttcaaacgacgcgcatcttttttcttgggattggtcacgaatgatgggcgagaaagccaatcagtcgatcctgatctaccgcaccgttctagtgcgtcaatgtcctcggcgatttgcatcaacctaggatccgtttcgattaagcgcttgatggaaatctgcaaagagacgaattgtcagacgaggctcgacgacttggaatgttggtctcaccttggggatgggcttgatcgtcaggtaagggtcgttgacgtccacttgctcatcgtcatcatctagatcatcggggtttaacttggacctggtcagattgatcagattgagactttgatcgtagacgtcttggagagtgtgcccccctgcccggttatgaccgagtcagtcgtgtctttcgtctatgtagccgcgatcatcctcaacacccaccgacatcgtggcccatgaatcgctgtacctgatcgattcgcatagtcttgcacatcgatgtcgctgtgccccttcgaatgttgtacggggagagctcgaactctcccgggaagccaacggcaagacagtatgcgcggaaaattccgcaaaatccattcgcagtcattggctcgcctgcccggaggctgttgccggcgttcgccgaacgaatgaagaggggcacatcgttcatatcttgcagaagaattaaggggtcgcttcgaccggggtccgatggtccgaaccagagttcctcgggggttgcatcgccgaaaagtcctcggcggtaaagggaggcgagcaggaaacacgtatcgaaaatgaggttgtcctcattgcgtacagtccgcatcaggtaaccgatcttcttggttgtctgcatgcatcgaaagaatcagttgacagatgacatcggcaatatctcgccaacgcactctttccatatagcctttgaagctttctccagtgaaacgcaaatcaaatcccaccactacgtttccttcatccccctcaagggtattacgcgtaaaaaccacttgcgatacctgttaatcgggagcgggaggatgcgtcaacacatgccgcgtgaaccccaacttctgaattcacctttgcaaagttcggataggactcggtcgggaaaagagtcccaggcctgagcgcgcacaacataaatatgttgatcgctgccaccatctggacatgaaagttcggatgaagaaggatcgctgggtcggtgattttgccaggcgagcgttttctgtgtgtcggcctacctgtacggctacgtcatagcacttgggagtccttacagacggcttagagttggtttgagatgaccctgggctcattgcttcttcgataatcagtcgcacttctgaaactttgaacgtgagccgttttgctttcgacgtgtcgaggttatgcgtgcgctggagcgattcgcagtgggagtagacatcttcacgaagagtaccgatctctcctcgaaatacgtggctcactgcgagtgatccagagagattgagaaatggtatccgataaagggggaagaggaaagaggaaggatcggcatgacccgggcgtttgggcccaacgggaagtcaggcctggaccacttaccgactgaaattatgctctctgcacactttctcaaagtcctatatttgatctttctcctgcgcaccttatgactcaagaatgtgcaaagtctcgaagccatctcccctcgttcccagacatccccatggggctgagtcttacacctacttagaccttattagcttgcgcgaattgaggaagtcaatctgactgagctcgcttaccactcgatatactgctttaactgagacatgtagtcgcgttgagtggacctcgcctgcctgaacatgtagagtccaagtcgactgtaatcaagcacccgagtcagtcctcatcgatgtgtctaagaccgtcgcgatccggaacgcaacgctgacgccgactacgtacatgtcttctgccgagaattgctcgacctcgtcgcggtcccgaatttgctgccatgtttcatcgtatccaacgtcactaagtctatcgaaatcataaagttgaacggcgtcctcgtcctccatagctgctaaaagaatgttgaccagcaacgcaagtcaacagaagagcagaaatggtacgacaacgcggctcacaagagatcgcgtcacgtgagcgggtctgtaagttgaacccagctattatgacgacgtgatgccccaccctttgcaatgctttactgtactctcttgatctccagttcctcatcgcgctgatcgcacgctccctctttcgattggatagatcgcacccgcgaatatatatgtgtggatttgtaagtggaatcagctccccggacatacaccttcgcgcgaggccgagacatcttgctgctgaaacgcaatgacggtcgcgctaccccgtgaagtgtgattcttttctcttttttgagtccatccaccatcaaaggatcccgtcaaaggacatcaccacaccctcctctgtgggtacaaatgaaggagcctgtcgtcagatccacctcgaacagcacagcccatgcagcttgggaggtacaattctagcggacgtgcacagcctgaaggacatgacgaccgatcaacagaacactatcgcttttaagctaggctttgacgacagggacacctttcttacgaaaactgatcggtttcttctggtcaagaggattgatgagtgattatgagtgatcatgcgtgatgggccacactacatataggtgtaaatccattgtatcatgaaaacttctccacgttcgacacttctttctacttattcagcgttaccatatttcactatgacagccactgctaccacgaccaagaccaaacctaagaccaagaccaacgaccacgccgatcctaaatcgactggtctcaagccgactggccgcaaaccgattgatccgaaacggactaccgctacccccgaaggcgaatccgccgatgttactctagttgacgatccgaagacgactactcgcaaggttgacaaggttaaggctagtggggccaaggcgggaaagatggaaaagatgacgatcgctgaggtcaggcaatcccaggtaggctcacacttctattcgtcgaattcgcccatcgacccaacgatcctcaccttcacgcaagatcgaggctgagttcttcagcaggaaggccgatcgcgaattttctcagaccatgtgggcggatgtcaagggaatcctcggagacctcagcgcgcgggtgcctgcccttgtagcgcagtacgttgggccgaccctcatgcagcctgtgagtgatatgcggatggaaacgagcgagacagcatgctgaaccgttcaaattacagttcatcaagggaggtggaggcattccgggagacaggtcggttgatagcaggaaagaacacgccgaggatatgttggagatggggattagcgggatccagcagatcgccgaggacggtctccataaggtcttggaggccgagacggacgacgacgatgacgaagcggtggtagagattgacgagatcgaagacctcgacgaccctggtgtcgatgttgaagagtattcccggagcgatgaagcttgaatggacaaggctactggaactgctctcacagtaattacatctactacgctgtgtccaacgcactcgccgtaactcccaactgcgacggtgttttgtatcgccgatatcaaatccatattggaacggctggctgaccccgagatgaaatatgcgttgcgatgggggtctgcacttgttcggtacttggcgataaaatcggatagccacacgtttcacgggcgaacggtagcatgtccccatccatttgctcttcccccgccacgggttcgttccgtcccacaatattatgtgtatgtaggagcattgagcaatgcatagtgcgggaagaggggaatcacgtccctctgacatttcagactggaggtcgaggggtttgatagtgcgggttggcgcgaaatgtgcaattgttatataaaaaaatcaaccccttcatccaaggagacgtgggagagtggtctaatccgccgtgttaaggtttccatcggaataccgcggtccttcggggcgagcgttcgaatcgctccgtcttcaaatctttttgcccgattcgcgcaatttttttcccttccgtgggcgatcgcttacttatcttccgaaggaccgcggaatttcaattgaaaccttaacacggcggattagaccactctcccaagtcaccttcgatgtttaggagttctgcacaaaaagtatatactatattttagtcttctcgtccgaggacttgcgacggacatgttgacctgaacgtccatggttggttaattggcacagtgcccatgcgacgggagcaccttgacttgtcgttttagctccagcaattcccgcctaacatcatcagccctgatgacatagacggctcggtacaggggtctatcaaagtggaaacgatgagatagtcgttgcccgaaccgtcggacgtgacggttctactcatactctgtttcgcggcgtcgagctgtcgcgcgcgtcaagggtgacatctaatcggtcgccacatacgctcacattctaacagtgaggagaaccatgctttccagtaagagagagaggagcaagcaccccatgggtttgggtgatactgagatgaacgcctggtagggattcctggtaggcctctctcgacagtgccagactccgcgatgcgcttgactcccagcttctagatacaggactgtcggcaaacccactcttctgctcctcaggtctcggtcaaggagataacaacggacggcatgaatacgatgtactcgtcatgtgggagtatgtttgatcgggatgccgcagccctatgggtgctgtaacacgctggctctattggccacaaccttttcgcgcttgattgcttacactccctgtaggaacgaacggtcagctagagcagatatttttgtacgatttgtcaggagatttgggatttacaaggtgtaatgtcgttctgactgtccattcctagttgccccttccgttatcacagcaacatcaacctctcattcgcctttaagacgtttctggggcggtgcatcttcagtatcaacgctgttggccagagtattccccgtctgggaggaggaggggttcgggttgatggcagtgaacccggcgctagagtgcgctgcttctgagtctgccaagctggcagtattcgactcgacgtcgtccggcgggatgacactgtcagggctagacacttccgtgttcacactttcttctatggaggaagcagcggtagatgcatcggcggaggcagccttgcgtttcacattatgagagatttcctcataaaggaagtcgagtttttgtttcacgaccttcttcagttcatccagctttggactcgcgtcttccttttccctctcgtatagccaaagcctaatcatagtgacccagaataatttcttactggctcgtacttttgagtattcgaactgcaattgcttcgtgcccaccaacccaaaaaatcctagcccgatcatgattcttccgacgggtgtgtttttgttcttgaatggagtctgctttaccgaattcgctaaagccacccaatcgttatcctgcgtgacccattctgcagcatcactcgccactttgtcatcaaaatttgcaaagtccttatctttgagaagaggttcccaatcgaaaggctccttggtctgctccgacatctggcaaattcaagcttttcttgttcccggaatcgtgaaggagaaaggtcttggatgaaggaggaacgcggtttaagcggaatgtatcgatgtcttcaggtctaccttatatatgcgcatcggagtatcggatgacaacatcgaccgcatcgctcctttcatcatggagtcggttctcggattacggcagtaaagtatgacgctacgttacagcagacgacaacgacggatcgagacgtatcctttgtcagttgacgcatccatatctggatgtcagcaggttgacatccgtattcgtccggatccaaggatgcccgaatgtcacacgaatgatcgagagatgaaagcacacatcctcgacgagccgaatctcgaatgcaaatatctgcgtgacttgctaatactcgtagaggcgccccctcgagatttcctcaccacactattgtgttgtctctgactcttcaagccccaagcatgaggactcagacgtaatctgcgctagaaccgatcggggtacatcttgtcatacatgaacccaagctatctttgcttatagatagctgggcgagagagccatgagtttgaatatagacatctccgaacatcaacaagcacactgcatacttcaatacgactcatccccgattaccgtcactggggttctcactggctcgatcgggaaatcagcttgtgccagctgaactggcatatccggttccagcaacacctgtcgctgatgtcggagctcttttaccactgtccaacaacttggagacggtgacgagcgaaccagattctgtaagaggctggatcattcttgacgtcgcacattcgttggtgaagctttcgtggtccgagagattcacactaaaaggggcgtcggtatccattgcgtgattttcaagggatgcgcatcacgaaagaacaagcaatgagcggtcaatcagcgcacattgtcattatcaaaacacttgcgcgttgatcgactgacaaatgactgttgcctttacgtcctagtagcttgtccgcggaaaccgtctcgattggtcggaagaaatattcagcgtacctctcgagagttatgcggaccatttcgttgcttaatccgttgtccgtactcgctcgcgttggatcgtatcttatcagcatataccggacgatcattttgtgatatcgtatcttgctctgatggccaggcatcgcggaatagccgagatcttcgagtcccagcccctggtattttgtggggactgggattggcgtatttgtagcaacagccggtttaacttatttcatcagagatctcagggcgtggctctgggtgacttgatccaagagcttcatcagccccaacagaattttcctgggtttttcctccgtgagaagggtctcccaatcgactgcaatctcctgctgcgagtcagagttcaaaacagagactgtcgtatcggtcctcgcttctgcgtgcgctgctatgccgcgaccgagattttcaggctcgaatgctgcccggttatgcgacactggactggtccatgtcaagcctacaccactgcggccgcttactgcacatgagagagatgccggtatgattgacgtcgagtgatacaaggagctcgactggtcgatcttcttcataggtaacgaccgccggagtcctgaggtatacctgtggcgttcccgaattatcttgacattgctacgctgctttcctcctgttttcgagatgacgggaggtggaacgaagagaaaaccagcgtgtctgtacagataagatttcacctcggccacatcaacgagtattgacgtgttgtattgagcgatccaccattggataagcacatgagagaatatcagttttcgaaatctctgctccgcgatagaaccctcaactgaggatggaccgggatctgctatacccaaactctctgtgtccttgtagattttcatggatgaatagtgggcgggttcagatcctacctctatccatagctgggctaggctgtcaacactcgtagaatataatttgatgtctttgtcgaggctttgtacgaatttctcagcatttctctcgtgaagtggagggttcgatgacagacgatgatcggaaagctgcgatggctcgatttgtggctccacaggtaggttttacgattaaacgatctagaaagacctcaaggtgtgacctagcttgttcagcaatactgcagctctttggcatcgagttaagactgatgatgtacatcgcttcacgtatgctggagaatcctttataaaaatgtcactcctaatgtccctcctttgatcggttgcgaagaatgagtgatttgctgccctacagggcatcgagcgaggctgtcgcagcacgtcttattacccagtctcgagggacgcaattgtcccgttgtctgttgttcgcttggatcacctctgcgtatcaactaaatctccatgatgaatttgtagatcgactatgatatggttcggaaatcagggtgaatgtgaaggcagccaacgctatcgcacaaccagaatgatgaagacactctaattagtagtgtacccggctcactcacgtgatctgcaccaccttgtctgcgctaaaccgccgattgctgtgaaaccgcccggagctgattgcagaagactagagtagggtttccgccatcgacgatcttcacacatgtcaattcttagcctgtcaatcatgtatcacgcctggaaccacaagtagcactgaagcagtagggcagatgaatccagggcaattgaagacttaatctcggacagggaaggcgttacaactcgatcatgtgcggtactcttcgttggtcgactgacacgtaatccgtctgcgatcccgagcgaaaccaggacagcttcactggtccttaacaaaggggcccgactagtaggaagggacctgagtgttcacagaatttggtaagggaagctgagactccaaggagaaaggtccgcttgcggccaaggtattgctattgccagcactagattgatacgcgctaggattggttggggaccttggttgataagggaggtatccttcaccagccgggtaaagagacgatcgagtagaatatagtagaacacccggtgtttgaatatcaacctggtaaggagatggagtgatccccatcgaatgggcacctagcggtccgcgattcaagcggggcgggcggcggtgcatttgtcgcaagtgacctaatagagaccgccggcctgaagttgtctgcatttcgtgtgagagaggcgacggatccgacgtgctaggcgtcccagcgctggtcgaaagtcgtgagctcggtcgaatgctgcgagggttgggtcgaagcgctcgctgttgtctcgtgtaaaacggctggctgatctgcacctgtcccgttgagacatcccaagccgtacttgagctggtaatagagggtatattccgggcccagatcccgcttccatcgaagaacgggttccgagttaagctggacggagggtcagggaccgtattttcggctaaggacacctcgagctccgtccattcaccacgctgatggtaggaagtcccagcgggaaccattgtaggactgctggttcgagaagagggatacattccgtctaggcgttcaccaaaaagttctgggggcgcgtcccaggcattttggcgtgggatactttgatgccgaatacgcactgcgttaaaagcctcaggaacaaggccatggaatcgggcaccatggattaaccaccacgcgcaaagctctttcagtgcaaacctgattctatcaattctttcggctctgtccggaatatcgtattgacggggatcgtgaggttgttcgccgtgttgtgtcgatctggcttcttcctggtccagatacggcctatgactgaaagcgagaaaggaggatgtattagggctgaatgccaaatcagccatcaactccccgtcgcgagcttgatcccttgggacatcgttaagtaaattctttgtcaacaagaggttctccatagtccacgtcaccaacatgaagcaccagagctttttgaggaagtgaacatagctcctgtcttgctccagcgatctcaaccactccattcggaactcctgaaactctacgagctctagcgtagagttctctgcgttggtatcgtcgtgatttggcatgttgcggcagtggttttcagccgagaaactcgggagagcatgtgtcgtcgttttgtgcttgcgtggaatcaccgctgaagtagccctatttcttcggccatcgacacagtcgactgctatatagcttctcctcaggctcgatgaaaggagtcccccgcatcgcgacgcttctgctaacgttgaagcatgtcatacattggtcaagtgcaaacacacactgtcacctgggaacaaaggaagtgggacgatacgtcttgaagccatcccatgtctacctgccattgagattcgaataggagaaagtttcatgtttttctttttgcatcaagattttcgattttcggcactgtagcaattacattaacctagatattagacgagctccccatgatccttttccagtccgagtgcgagggtatagtgagggttgagcgacttcgcgactgcctttactagctcttgatgtgtaatcatacaagtgctcgccagatgtgaggtttgactggccgaaactgtcgtgaagactggattcgtttcgcccttcggcttccggtcctgttaggtactcgtacgccgcaaaagatgagcgactggttgtctccgatgctacagctcgatgctcgggtgctgtcaacgctatttgggtgcgtttctcccgcagatatctaggaaattctgattcgcccagatcggacaatctctcgggtaacttgctgcttcggtgtagtgaggtgtaagcaacaacatctttccatatgtggcggttctcaaaatcgtgagggatgtattgctccatcgcctcatcgtctctgatatccgttagcgcgataggttcggttttcttcttgacgaacatctggttgaggaagcgagttttgtcgtgatgcctgtggactcgggacagccagacctccaaggtctggaagaatcgcgtgtatcgggttcgaggtagtccgaacatctcgtagtactgccgcttcaacgagtcttcgcattgctcgggaccgttttttccgcttatccaaggcgattgcattgcaaatcttcacgataactttgacgttatccacgcgtctagcagcatttgttgatttgagggccatataggcaggtaactagtcgttcgaatcggcttgttagaactcgtccaattttcatctacaaccactacaaaagcatcgacccgctcctaagattcgtccgctcatttgtgagagcacgccatgcttttccaaaacaactgattcagtcggcaccacgtgtcacattgacattggccttggggtaacggctgaagtgtcccagctagttcggcacgacatctcggggctgataaagctgcgaatcagtctcacagcgccagatcgtctagaggcaccgatatcatcgaactcctggctgtcaatgatactccggttatccgtaggtcaataaccttcggccgttttcagtatcgctccgcattccacaatttatatctgagccttgaaaagggagctcattagtttgcaaccaattcgtcacaataatcctgcaagctttccggtgggataccgattctttgatcttggcgtagagtacacgttgtcaaccggctcgagtaatcaaatattttccaggaagagggttgctgatgaaggtgaagtcatgatgagaaggtcgaagccccagagggaccatgcacgactgcggtatactgtgatgatctctcgtccgcatcatgctcagaaagaggcgaatgctccctaacaagcgaccccagattgatagtgaagatcttgaggaatcggcccgggagttttcaagcccctctggcttccatcgcgacaatgatttctgcaagctgagttgtgaagatgacatcggctttctcgaggaagaatcttgaaagctttagcgtgattttgcactctgataaatccaaaggcatcgctgtccatattcgttgtgcatggcagaagtatcgttggtggttatgaatacaacttaattacaatcgtttgtagggggaggttgggaactcgattcgtgcgaccctgtgtatgtaatcctggaggatgtctggcacggaaatgtcccagtactggtggactccagagatccgacgacgtgatcatctcgcttcatatagagatacgaaaagatgcaagtttgaacacacggatggagcgcagatatgtacagtgccgcgattcccatgacgagccgtcgacactcttctatatctcgttgctcttgctcggacccctgagattggtcacgtatgtacggacttacgaaatagcatagttggccccgctgctctttagacgagatcaaggccacgtattgtgccatatgcttaggttccgcctgcgcttcctgttcaagggtactgaatgtgcgtttcaaaacctcagtatcagatcgatagttccacaagaacaagctcaacccgacgcaaaagtcttttatccgtccatcgtcgctgtgttgatcgtcgacagtaaaggacgctttgaagggtaggagagggaacaactgagatactagatcatccctcgcactcggcctgctggagctcatcctgtatcaccaggcgagatccaaccatgatttcagtgtcgaaacatttgttgtgagcggattgatgtgcttacggggatgtcaagtgcgggttggcagatgttgtgggttgaagtgaggttcccaaagagcccttactgacagtggtctccgcattggccgactccggtagatatgagactgtgagacctgcgaaggtactgtcttgtagattgttttgttccttcggcattggcgccagacccaggagactttctcgccacacgtatgccgtacggtcgaaactcagactttcgtctcctggtaaatttttcaagaacttgttccacggtttctcgtagattttacgtcgatacccaaacagcattaaggctatagatcgccaacgagagggtatcttgctcttctccaacagaagctcgaagtcttgagacgccaggtgattgtgtgcagcctcgaagggcttggtctcagccagtatcttcggattgatgtctggaagttgattgagagtcttgatcacatccctgacgaacaagagatatggattgatcgagcggatgtcaatctgtagaacctgtgacattaagcaagacgctattgcggtatgcttgccaagatcccaggcctggttttctgaaaaagacacccctacaggtaattcaatttcgtccatggcgtttgaaaagtagcacgggatccactataagagatggaaggaataaagatctgtcatagattagctgtgggtcaggcaaagaacccagatctctaaacgatcagctatttgaacgaatggcaaaggggcctaaattctatgcgagagacttttggcatagagcggacgtccaaataggggtaagctcctttgtattacgtgctcgtgaggagagggagacgtcataggttttttacggttgaggcagggcacgccttctgtcctttccccagggaagtgatgcacactttattgcggaaacctaacgagacctttctgagcgtgatctgaggatctcgttcagcagctggcctggtcacgtcgcaaccatctcgcaatctcattactgtttacccaagtagacggctttacaatcgaattcaaagcaatacgatcgtccgaaatatatagacggggcatcgtgcctatctgaaaacatcccattataacgaactctcgtcatgctaattggcagtcgtcgtgaaggacggcacagttagaggtgccggggtagtgctccggagatcatttgaaacaagggtgtgatccttgcttgacgaagttgtcgttcgagatgagatctcatgcaagagcagcagtgctgtgatacgtttgagtatgtgcaggttgtccggattgttgtccaatgccgtacgggcatccgctgagatcgacgtatcataccttgcggtagaacaaaagacatccgttttgagcaaggggtttataacttcgtcgaccgtctctgttacctcttcttcgttgaaaggcatcgcccgctcgacgttttctagtatgatacgaaggttctcctgattatctcgaacttttgcaaggcgttcgatgaatagctccttgagcccagacttgctagctccaggatggacttcagggtaacttaatatgcgacagacttcatttaatcggtgccaccagtcgtcattcgccaactggccgttgtctggcctaagagatcagcggtacctcaggatcagtcgtgtgctcgtactcgtagcagtattcaggaacagtgacaacccactgtgttactccccccatggtccgaaggtgcgagcgatcgtcattagtagaagaactatccgaatctacatgatgattcaggatctgtgtctgatgagtgccaccactggtcggcaaactccaccgaaccccacctgtcgcgaatgaatcttgttgcgagggtccggagctcgaagctaaagtctgtccaaggatgctcgattcctctgagaaagacgccactgcctctgtgtctgagactgcttcgaacgggtcgaatttgaaagagggatgacagaatagctctaagaatttgggccactttttttgttttcggttggcctcgtctctagttatccacaagaacaccctccggacgtcagtgagaatctcatctctggtgtcactttctgcccatcggttgttggcctgtgccgaatttgcgtctacgatgatctgtctcacttgctggccgtttgggtcaagtacacttctcttcattacccttgaatcttccactgcttgagttagaagatttaatctcgggcgactagtagcccatcgttgcaggaacaacagcatatctttgcggtagttgtcattgttcttcaacctcaaattggctaggtctttttggacatcggtcgtgctcaggggcgggccgcagatattgtcgaattccgattcctccgatccttgcggccctcccgatgattgcacgtcaatactgaaccacacgaagtcagtaatattattgagcgagtatcactgcgacgcataacacccacgtttgactcctatgggagaggactcttggcgcgattggtgcaagggcacgtctcttcgtttcaggcggttctgatcgaatgggtctctttcctgaagttatcctaccgccaagccgaggtggcttgtaatcatgttgcaagaatgcgacgacctccccaggaccgagatacgcgcattcgatgttggatgcgaaaatgagaccgactagcgcaggccagcctggggcagtagatatgttcaagcgatgtcgattgagaaactcctgaccgacagtctcccaaccctcataagatatttccctaccatccctgatcaacaatatctgtttcattgccaacaatatctgtttcattgccaatgtgagccgttccggaccctcgccagattcaaacagagagtcgatcaacccgccaagtttctgggtgtattcattcttctccagttcgaaggtgagtttgacgaggttctccaacctgtcccttatctcagcgtcttcgttggtttcgatttgcgaagggcgccctgattcgattgaggacatgttgctagattcacgtgctgtgagcctgtttctaatcgaccgagtgacggaacgtataaagtcgcctagtgtgcccgataaaatcgtgcgaaagaggtctttcgatgtggcgttatatattatgccttatcaacaaagggtataatgcctcgaggtaaggcgacgtctcccactcagcgtccccgttggaaccccgtcaatcaaaggagactccagacggcgtgcggcaaggctcaggatcaccgtatgtagacctccagcgtgtgacagatcagatggcagaggtctagaacttggaagaaaaggaagtggggtgggttggaatttaggaagatcaagctgggtttctgacgtgccaatttgaaggcataacaggttcgacccggtttctcagattagctcccgttcgtcggccgagttttgggtaggcgagctgcccgtattggtacgatctgcccgtactcacgtacatgagcacggaggtcagggccgagtttatcaattgaggggacgcatcacttcctcaccattagtgagtgtgtgccatgaatatccctgcccgagacagcgcaagcagagttcaaccagacgcagagattgcgatgtgaaaccgaaagaacgcgcaagacgctcgagatgttgccccacgcagcggcgtctcgaagagacgggaacgaacacagctctgaatgcccgatgggaagtgcacgaaagggtatagcggatgggtgaacgaatcgagtgtgtgtaactcatgaccgaccagcgtttcaagcgatgtttcggcagtaaatcttgatttgatcggaatcaaaaattcgaatttgcttccgatccccttccctcccagcgaatacgtcatcgatcgatcgagaggaagatcaagggagagcaagtttgtgaacatgtagtagactcggcagatatggtagttgtagttgatctcatcagaccacatctacgaccgatatagacgactctggtacaacgaacatcctccgacgactgctacatgctcattcccagatcgatcacgtccctcatccattcaccccgcctgtcgaccctctaccggcacttgcaaacgcgaataatcaaacccgcgaatacgacgaaatcgagcatcaccttccgtcccatcctattcaccctacctataccaccaacgactactaaaagcatgccacctaaaggcagcggtaaacggaaaagaactcaagatgtgaaaaccgacatcgacatttccgcgctcccgactgacctcacacctccccccaactttgtcatggaacaagccggtcgactcggctcggccacctccaccatgtccaccaccaaaccgccagcgggacaggatctgatgaccacagcagctggagagacgatcagcgtcaatccggataagaacccagagatcgtcgatgcgagatcagcactccgagcgagccccgacgccgacgaggatcagagaaagggggaaaaggcgacggaagagtttgatgtgggaaacgtcgtacaggggatggcagcggcggccaaggaggacgcgatcgagcccgaggtggaacgtgcccaagaggctgcagtgcagaggaaaggaagagcggcgaggggagccgcggtgaagagccccgtggatgggtctggttcatcaaaatccgggtccggggtcaaggtggatgacaaggcctattcgtcccctcccgaggatacgatccaggtcaagagggaatctatccccctggccgccgtgcaaaccgaccaagaggatggcgaaggtcagcctcctgcgaaaaagacgaaaaagaccccgaccaaggcttccgtcgctgcgaaaaagggagccgacgagatcaaggcgttcgtagccgctcaagccaaggtgaagaaggaggagaataccgacggtgaggacgcagccggggggatggacggggatggggatggacctgagggtatcacggacgatatggatgccagggagagggaagcgaaacgacctccacccgtcaattccgattacctgcccttgccatggaaaggccggttaggttacgcctgcctgaatacctacctccggttctcaaacccgcccgtcttcgcctcgaggacatgtaggatcgcgagtatcatcgaacatcgatatcccctgaccaaccctgacgagccggaacatccgacaaagaaccgacccgacaagaccaagacggcctcggtggaaagggggatgaagtacgtcgaatctatcggtttggccaatgcccaggattgcatcaagatgatccggtggaacgccaaatacgggatcaggtttatgaggttgagtagcgaaatgttcccgttcgccagtcatgacgaatatgggtatgggttggaagggttcgcaaaggacgtcttggccgaagtcggcaaggtcgctgcggaggaagggtgccgtttgacgacacatccagggcaggtaagttgcgactttgtacaggcagaacgtgtcgtcgagacgcatactgaccttgaggctccacgtcgatagtttacgcaactcggctcgccacgacaacaagtcatcgataatgccatccgggacctcgagtaccacgcggaactcttgtccctcttggccatgcccgagcagttagacagggacgccgtcatgatcctccacctgggaggggtctttggcgacaaacaagccacactccagcgattcaaggacaattacctcaagctgtccgacggggtcaagaaacgtctcgtgctcgaaaacgacgacgtctcgtggagcgtccacgacctcttgcccgtctgcgaggagttgaacattccgatggtcctcgattatcatcatcacaacatcatctttgattcgacccagttgagagaggggaccaaggacatcatggacctgtacccgaggatcaaggcgacgtggacgaaaaagggcatcacccaaaagatgcactactcggagccctgccccgaagccatcaccgggagggaaaggaggaaacataacccccgtcccttcacgcttcctccgtgtgcggacgacatggacctcatgatcgaggccaaagacaaggagcaggccgttttcgagctgatgaggacgttcaagttgcccggttgggacacgttcaacaatatcgtcccttacgagagggatgacgacaacaagcccgagccgaggaagccagccaagaaggccaaaaaaaagaccaagaagcagttgcaagccgaagccgatgacccatccctggtggaaaaggaggaagccgaggcggacgtaccaaagaaagaggtcgtccccgaggaagaagtcgggatgggcgggaaattcaaccgcgtctattggccgcctggaatggaagagtggctgagacccaagaagcgcgaagtgaagaagaagaacggggcggacgaggttgatccggtaacgggtcagacggatgcgcaggcgatggccaaccctacgccgatgaatctgaaacagcgtcaggcgttcaaggccagaaaggccgctgctgccgctaccactacagatgaggggacagatgcagggaccgatgccggaacagacgcgaccgagacgagcaaggcggtcaagccgaaaaaggcgccagcaaggaggaaacccgtagccaaggccaaggctgccgtcgaggaggaggacgacgagctgaccccagttgaggaggacgaggatgacgccagttcacccgatctcggttcagagagtgacgagccagtgagcaacaaggcaaagaccaacggagcgaagggaaagaccgggaacggcccagtacgaaggacggggagaaaggcggcgacgagcaagagcgccaaggtatacaaggaggccagcagcgggagcgagatggatgtcgactagtgtatgggcaaagcgacggagacatactcctggtacatctcgaaatgtataccacctatccgaccagtcgaaagcgaattgtcgagtataataatcctcatgacgtcggcgaacctgcgcatatccgttgttcaggttgtctcgcaaggcgcagcgataatgctgccgcgttggcaagtgcagtcaacccttttctcttcacgaactccgggctgttctggttgtgtctcgtggttgagatcggttgttggtgtttgaaactgggaattgctgtcggaccaacaacgtcctatccgggctcggttgctccggtctgagtcccagtcgtcaccgctccacttatcataagggtcccggtcgttgtcgaggccccagtcgtcgtgcaagccccggttgtcgtcgacgtcgcggtagtcgtgcaagcccccatcgcggtcgaagtcccggccatggtcgaggccccggttaacatcgccaccaacaacgtccgtatcttccgtgctattggagaggtaaaaaacctcagacctcaaaatgtaccttcttggtggtacacagcctacttggagaaccagggtcattgggtctaaggtccattggcactgatgctggtcattgtctgcaagaacctttgtgcgagggttcaagtcctatgggccgggtccgggtttcgcgtcaaaccttgtcctactcgtataattgtgtcttgtactcgtagtttgcgcgtaaatgtacccttgccaattgcgtcccgaaccggtagtcgctagtcgcttcaagcttcaaatcgttcggttttgtcgtcgtgataagtcgatgactttgcctctcctcgttcgacgggataacgtgaagagcaagaagacaacgcaactgtagctctgcccctgagcacccaagagatccggagatagccgaccttcgttcaaagctaaggagcttcaaggttgcgacctccacaggcgacctgcttgatcgagacaaaggatgtcatataggatgagcatgcgcatgtacctctaggcctctagggaatcacacgagaaccattggaccgaccctccactcgatgctagtctcaaggtcccaattcgggtcatcatgcaacacctcgacaaggaaaccggcttgatcacgacgacgaacatcagttctctcacggatgaccaacgggagttctttgtcgagcatgggtggttacggattctgaacggtaagaagcacaatcgatattctgtgttatgggacgggacgcctctctgatcgtaacaccctcctggccatgatctatacagcgatcgacaagaagtacattgatcggtggatggccaagctttggattcggctaggtcaggatccatacgacaaatcgacgtggaaaaacatgtacctaaagctgtgagtacatcgccagtattgccaatctacccggcacaagctgaagtaaattcgatgtgtaggccgaaacacaatgaagtagccttctcggaattctccccggacgcatggaaagcgatgtgtacgtctcaccaatcagcccagaatgatcgatgttgtaacgctgaaacgagaacggcccttcgcgacgacttctcaggcgaaatcgttggtggagaagacaggattgataccgatcgagaatacctcactggcgacaactttatcatcaactttggcaccgctgagtggaagacggtgagccagggcaggctggcactgggaaggcggacccgagtagctgatgtaatacctcgctcgatcatagcgggagtaccgaccacaggacgctaccgggtggcatatcgataacgactactttcggcactttctcgactcgtcctcgaacgccttgaccatcatcaactgcttcactgatgtcaagcctcaaggaggcggaacctttctcgcggaagatgggatagagagaatcgtccagatcttgcacgaccatccagaaggactcgaccctccctttggctacctgtttgagcattgtcgtggtttaaagcgatatgtcacggtgagtctcgctcgagaaggctggtatatcagcgaaaccaaagctgaggtgaatgagcggttgggtaacaggccgaagccaaggctggagatatgatcatcacccacgcattactggtgaggacattgtatcgatgcgtcgatccagcagatagtttactcgcccatatcgcgactcagcctcatgcaccgagccgaaaccatatgcactacgcacgggtaatcacaaactctcatatcaatcttaaagaaccgtataacctcaatcgggccgatgggaactacgtaagcatgtcaagcttgagcacaatgcggtcgatatctcatccttggcttgctgtcggcacttcagagcctctgcgaacaagctatcctgcgcgctctcggcaaagaccgagttcctgattacgttccaactcgtcctcgcatgatatacttcccgaggacattcacctggaaacgagccaagattcaagaggaactggaccgaatgatcgcagctgctgctgctaaaggtctaccttcttcgacagtcgaatctctttacctgaagggcgcggacgttattcgagagcacgagcggaggaatggatatgatcgtccgcatggtccaggggggatctgcgaaaccagtcaagacccggtcggcaaggcctatagtgctcgacgcaaacttgagttgggcttgtaataacaggagtggatatacaatcacgacgaataaccctgctgcctcagtcatgctcatcgtccgctcagttagttggaagatcgctttatcgtgctgtcgtatggacaaggagaatacaccaggtctacagactcggacgactgcccgaccgcgagtggttcatctggaaagcctgctgcggttttttcaaggaacatcgcgacgtagacaccgtgcgagcacacattcacagagtcatgccccagggccgtcggtcgcaatcctgcgaaaaagagtctccctcgatcagccatctcttccaccttgtcgttttcttcaatgtcatgtctgcgccgcaaaagttgtcatacgcccggcctgctagaatcagctgaccagccgctcgacgatacatctagcgcgatccccacctccggtcccgggttaaaaaaggcggggaaaaggaagaaaggctaggcgacgcgtatttcaactcttcccctcgttccccgtcagattcgtattcgtaccctctcagccggttgaccacggccgacgacggcgagggtttgcgagtccaggggggttcggttcagttcggctccgtcaggtatactttgttagctgttccatctcgacaacagggtctgagagtaggcggaggaacaggtgaacaaggctgtaatagcgatcgttttttttggacaaaacgtcctcgagatagtctcgtatatacccggagaaatttggacgacgccgggacttgttggtttgagaggtcagacgagtgacggttgcgagtgggatcttctggaatataccccttataccccaacgaccacgacaaagctttctctcttgctctctctcgagctctctttaccctccactttgacttccgattcgatcgccacacctaacaacacgtccacgcaaaaccagcttttctacgcgatccgaagtagctttgacttgatctcgcctttaccaccgccgcggtacaattctgctcataattcgcaaacgagctgaaggtgaacctcgggtggattcaatcgaccaataaatccatagctcgttgcggatcgtacgaccggaaatcgcgagttgacgaccgacgacggggtaacagagtttggcaattcgctacgctcaagtggatatcatcttacgagcgaaacacgaacggtcaccctcgaaacttcgagtgagacaatcggtcgcggggaaggaccgacctatccggacgaaacggggtactctatcaaagccttgtggctagacagaggcgtagatcaggggtcgcttttgagcggcataggaaaagagggaacgaccaaggggtcctttctggtgtatttctgttcggcggtggatcatctacttgaagaagctaggtggtggcgtcaaggaaaaggagcgtttcaagaggacaacgaggcgcggccagtggagcaagggagtgattcttgcgatcagctcgacgacgaccgacgatcgaattcaaaggagggtcctaggccgattcaaaagcatcagggcgcgagcgacgagcagacaacagttgtttgtgattttgttcgggtccgagacaacagaagaaggagcagaggatacggagaagatcccctcgggaattgatttgatcaggggaatttgattgatctcatccgacgtatccacatcacactcgacctcatcgaagagcgagcgacaagcgtaaaactcgcaactcgattcgagaagcaggacgaccgacgacgaacacaggttataatcgacagtacatactagcatcctagacaacaccgacccagcattacctatatacccccacctcatcgacatcgtttgttcgacattcgaaaaaccacatcaaccgaaaaaaagcacgatcgacgagaatcgtctacgaccctttcctctctaccttcttcttcttgaactcgcattcgccgccgcggtttcttgtacaccccgcataccttttcttgactcctaccatctttgacgacccctaactccgttagcgaagaaggacgacgatcagtattcggaccaccttacaccttagtctcaacatcgacatacgtattcaattgccgatcgggacgacgagtcactcggaaaggacatctagacgtagatcaccacttccacttgcctggcatcaatctttatcctaaacaagcagccacctatcgcatctacgattggccacacctcgcttcacgaacaaaatggagacgatgcataccctgttctgggcatacccaccacgcggtacgaccccctcgatagcttcttcgtcagctgccaataccaacccttccaactcgaactcgagcggtagtcgcaagaccaccgtctccaccgagtctggcgtaggagctggattcggacagcatgccggatcggccatgggcatgggaatcggagcaggtgggagagcggggccggtcaggcaggcttctctacccgctcaacctcaaggacagggtcgaccgggcttgggattgtcgaccatctcgtcggctacatcagtgtccggaacgtctacaccgggagcaggccgtgaaccgggatcgtcatctgctatcactggaggtcctggtccggggcgaggaatgcccggaaggtccgtcactatggcacctggtttcacccctgtcaacaatccccacgcttccaatgccgcgcagaacgatttcaatgccccttcgccaagctcgacgatgtactcggacgacccgtattcccccttcccgagcggttcgggggactactctccttacccgcaatacagagatcgtgggtccgaacagcagcagcatccatcccgcgtccgtcagcagacttttgcgggtgtgagtgccctatcgacaaccccgtctactaggcctgaacctgtcggttcccctgctcgaggtcagacggctactcaggctcaaggtcaaggtcaaggcaggaaggatagcgaggatggtgcctcgaccgggtcagcgactttccctccgagagcccgggcggggagaagaaccaagacggtgcaagagctctggtttggaggagtcaccaaggacgagaccttgacggaacaaaccgacgagccggaagagattgacgaggaagacgacgaggaagacgcaaaggacgccgacaatgacgatgaagaaaacccacacgagatcgtggtcaaagatgcagagcgggagttgaccctaccatgggcacgatctgtcgccctcgtcgtctcgagctcgagtggagtagctatcgacatacagatcgtccgacctcatacacccgtcccgaaagaagagatcagggagatcccgctcgtacccggcctgacagctggagctgagcagcaacagcaacacgagagacgacgaggtgtagaatcgttcggaacggggccgggaacgggagaaccgaggttcttgttcaggttcaggggaagctatgccaaggtcttgttcgccaagagtgccctgaggcgcgaaatcacaccagaggtaggtggacaaacgcgtgatcagccggtctttgctcttactcattccacccccattcgccctcgacttcataggccaaggcggaagtcagtttccctttaactcaggtgtactcactttcggctctcttcccctcatcctcgaggcagactggtctctccccaaacactatcattccggaagtccgggccaagttaaatgatatcgctatgaagacgggcgtgctgttgactatcgatgacccggttgtcaggcgacacggtggctccgctggctcggttcgtgagagggaatcgatcagctcgggtacgccacatggtatgactgccagaagacgacgcggatcgggatcgagtgcgagcgcgacgaggagacccggtacgacctggaacggcaacgctggtagagtggaagagccgcaagcgcaacaacccgcacccgcaccggcgcccgataccggggtcgtcatggactcgcccgagagtatgcatatggaactaccaggcatcggagctcaagacggagctggtgtgatcggacagaaacctggcagccggcaaggatcgaggcaaggtagtctcgaattgccgccgcgttcggcaacctcgagccgtttctttcccactactgcaaccgagtcgacgccgtcgcctgcctcccatcggttctctggcatcttggacagggaacagttgcaggaagaaatgctcaaccagactttcgaaaacatgggattcatcaaggaaggaacttgcgtgatcgtcgtccaaggtctgaggcaggccgtcgcatcggcaaagacgctcctgcttgtgctttcggacgaactcaacggacttcacgtcgaaacgatcgagattccagaaaagctgcaccggatcgtggcaggcaggaagaatggggccatcaaccacgtcatgagcgcgacggaaactaatatctacatcccggaaggtcgtctcgtccaagctgaagaacaagccagctatggaagtctcagcccggtgatgagtccgcccttgcgattctcgccattcttgggggcgacctcgcctggactcggggccggattcggagctggaccagtaacaggtattcccggtctgaccgaccctaccgtcccggaccttgcgtctggcttgagcgcgctcagcatgcattcgcaaccatacgccagtgtcaccaacaaccttacgctcagccccggtcaactgcctctgaccttatcgccaacgcctacgcactcgggctgggcatcgcctggcacgatctcgccgggcatgcacgtcgctccgggaatcaacagggacgtcatctatatcacgggagcctcggccgttcgcgtcctgaatgccaaagaatggttgctaagatcggctttcgaaaaggtctgtgcaaagccgaatttttgaagagcgacttgcatctgactttcactcggaatctctcctaatccggttgttgctcttgaccacgtatagaacgccgccgtgatgtcgttccagtcccccctcagccctcggaaattggactggatgatacacgaacggtaagcgttgggttatcgtttcttgacccatgctacaactagctgatccaagcctgcctctcagctctgacacggtccgcaagatcatgttcgacaacggctgtaccatcagactgcttcccgcaagtcgcgttggtttggtccaggtcatgggcgatcacgaagtcagcatcaggcgaacaatgaagcatgtaatcaggctagtcacggacacctgcctcgcggcggcttggaccattgagaccgccaatgtcacctcgcgatacgacaccgaggatcaagcgaggaagcttgccatcgaaacagacgtcgaaatggcgtctggtgcaggctgcatcgaggcgttttcaggcgattcgggaatttccggtgcgaggcggatattcgacatgatcgagaatcccaccagtgtcgtatgtatcgatcgtaccgataatcctagtcggctcgttctgactcgtctggcttggcggtctcttcagggctactcgacgcatgttcaattccaggttcagcccctgatcgaacaccaagactttttgggtggcaaggggatgggtaagatcgtttccatgtctcggaagtctaacgccaaaatccagcttgtgccagccagtgagtttggtcttggtccactctcccttcttctaaatactgacacttgtcattgcttcaggtgaccgcctcttcaccctcgacatacgcagcgaaagcatcgccagtgtcgcaaccgccttgggggtgctgcaagaggagcttcctgcagagacgtcgttctaccttccggaagctttccatcgcaagatcattggcaggaatggtaagaacatccaagagatcatgtatcgccacaacgtggccgtcaggttttcctctgcagagcaatgggccgagttcggaggccatcaaggtgaggcttcagattgggatatgtcgtggtcgcactgtgctgaatgcatacttactgcagataacgaggacaacgttcttatcatcactcccgcaaagaacgctgccgtcatcgagagggtcaaagatatcgtcatggagcacgtcccggaagaggtaggccacggacgcgagggctttgtcccggcattgctaatatcaacccttctcgccagacccgatactatgcacctcgctatgtgacgcctataccccgcgcataccatgcttcgatccaagccaatcccgccctgcatcaatggcaagacaagtttggagctgcgatccgctgcttacctagggaacgcggcgtcgacgctatcgaggtctattcgtcattggccgtcttgcctgcgatcgagcccatcttgcgagtgagtacacagacaacttccaggctcaccgcttcactgacacctatctctggaaaccagtcactcgtccctcttgaacgacttgctgtgattcgtaccaacgttcacccactcgaccttcccgactggcatatttgtgcgcaaaatgtgctcgattccaccgccgtctcggttcgcctgagcagcatgttccgggacgacaagatggtcgggatcacctttgtcagcgggatcagggatacagcgaggttcgaggtggccaagaccatcttggagaggttctttgccgaacgacagaggcccgaggtgtcggcaaatgcgttttcaccgtgggggaatgaaggtgagctggcttgccgctcttcagtatttgcctacaagagatgaaccgagttcttgccgacatcacagctgccggtgccaactcgattgtctttgctcgagctggatcggaaccgcccgtccaatatgagaaccgcaactttagaacgaccgtcaagaatggcaagacgggctcattggacccttcgatgacgatggactggatggagaggaccgggaacgtgagtctggccaacttccgtgactcgaatgatctgcttgattcctcgtactgatacacctcaattgttagtcctcgccattcgagagtatcccggaggaggcggctcaaccgaaaggactcgcccagcgtctgaggattgcgacggctcgaactcaatcgttggacttgaagaccctcagtggaagtgcgggagcgtacttgcaacaacaacaacctcaatcgccatacctccaaacccagactcaaaaccagacttggaaccagaaccaacaacaaacatcgaatcagatgcactcgcatgcaaaccaacctcattctggatacggaggaccgacctcggcttccccgaccacgagcgtcttcgcgtcggaccccctgagcgcgacttcggccggcttttataatttgcctcactaggctcgaaaacgataagctttgggcactctggcgtggcttgactaggttggatatacgtgattgggaatacatacgagaaagtacaaggataccgggaatatgcggatacgagacacggggagatgggtggggctgcggcgataggaggatatacgtgatccttaccgactgagaggaccgaggaccgctccactcaacaccgatcatgaatgcgccctttcggtcagatggactgggataccccggctctgatatagacctcgacccccgctttaaatggggattgcacgcgatgtaatttcttttcctgtgatgtcttttacgaacccataccatcatcctctgtccacattattacgagctgctcctccacctcttcggtcgtggtggtcaacgtcttgtgcgtcaaatcgcttcgaccctgaccttgcttgtcgtctatcccgttcgggccaagccgacgataatctttgccaagattgcctcatggttgttcccacgtgattctccttcgtcgcccgatgacgcggacaacaagaagcccgagctaacaagaagggtgaagcgactacaacgccggtcgtgcacagcagatgaggatatggacggatcggtatatctacaatcacctcgtcaccttgatctcaacagcattgaagcagaagtatccaaggtcgtgtatattgtgattttttttacatcgccgtcacgcataactcacagaagaagataaacgcatcatgaccgccgtcattcaagatcacgtcgccgaggtatgttctgtgtccgcttccgggttcaatcaccacctttgccctgaccatatgcgcatgccttgctccttgtcagcacacccgtctgaccagcgagatcgaggagatcgactatgctcccccgacgctgaaacaggtcgagagtcagctggcagaggtcaacaagcagttgacggggagcaagtccgccttgggcaagttggaacaggccacgtgagtcacacttccccggtcatcgtccatcgagacgcaagaccatcaagcggttctgataccaacaacctctttgcctgattcccctctgccctctgtattctctactctccgtgggtcaccataatcgatcgcactacagcaagaaggagtaccaagaatgggccgagatccgggatcggacctcgaagcgattctgggaacgcgtcaagcacccccgttcgtatcaggagaagctcagcgacaaggagtccaaggaagagaaagagtacctcgaggctttcgaggaggagagaaggttgaaagctgagatcgaggctatggagggggagatcgtcagttatgagaacgaggtgagcggcggggtctagcagtgagatgagcagaagacgtggagcgtggacgctgattcacaatgctgtgaggtttagatcaagaacttgaagcctctagccacgcaacatgagaggttgaggaaggctttggagcagctctacgagagggtattcggcggacccactcctggtacgtacagcgcatggtacatctttactcgactcgcagaggctgatccgcttgtatctaccgaccatgtcttacagcacaccctgaagaggaccaggcagagcaggcataccaggcagctttgacacattacaacgaggttcgtgctgcttcttgcctcgacttgacgtgtttccaagattgccaagctgattacaggtcgcgtcatcgggtaacagttgcaaggaagggtgacgaacgagtcgagagcctacaacttgctgaaacaggcggataggagtatggcgatgtcgtacaacaacatgaccaacgtaagtcgccgcttacccgcttctccatagcgcacacctgcgattcgcaactgaatcgaccctatccttctgccgcttgcaggctctctctgcctcacaattcgacatgttcggcggaggcgtcggagcagacatgatggagcgtaacgctctttcggaagctcagcgatgtgcggatcaagcgaggatgtttgtccagcaggcgaaagggttgcagccgctcatcagggatttgagcgatttccaggtcccccgagcgtgagtccatcgatgctatggatcggaagtgcattgatgctgatgacatgtatctggtctgatcagctcgatgggagacatctttttcgataatatctttaccgacatggctatgcacgacaagatccaagcgtcggctaagaacctgcagaggtgtcacctcgagcttcgtgaagtcctctctcaatccctcaaccacttgcacgggctcgaggctcaatcacgttcggtcgagggagagctgaacgggacaagggagagactgaagagggtccgaagggagatcatggagagggctggggagactttgcccctgtacacggggaacgcgcctccgggctacgttcctcctccccctatggatcagccctccggtcagatgggaggacaagcggaaggaagatattacgggaacccgttcgcgaactccttggagcagcagcaacactgagcggaggagatgagaagagacttggtcgaatgagcgaggtatggcgttggcgatatgctgcgaactagattagactttaggttgtgatgttgtgatagaacttaggaatggactgatgtggtaataccaatgctcctgtcagctttgctcgttaccgctgtatgcctgccaacatcaggcatcgtgcttgcaaagggtccggagaagagggtcgggtttgaaggagccacaagtacaagctcacgcgtgaacactatgcgactcgaaccatcaactatcttggatattggcaacgtcactcggtgtacacagcaatttgcttgaaactttcactcggatcatttgggtgagcaagaagcacagatcgttaagacgtctatagatcgatacagagaaacttaagacgaccgttgtgcggaccatcgttgacaacaaacgaatatggtaataaatgtggaatgatgacgaatttgaatccgaacattctgtggatttgttgacaatttgcttccgaacaaggccgcgaaccttggtcgagaatagatcaactcgaggtcgacgaatctggcaagaagcaagaaggactagacctcatttgagcctctcaacggagtccaaggcagcccagatgctccttggacatacatggaaagatacccgagcacaaataagccagttgaaatcaaacggacgccgttcggcctggcctcgaagtcgatcaattcgcacgtcagcatcgtcgtcgtcgtcatcatcatcgaaccctgggtgacccaggtttcgtgactcaaaggaaggtccattgtcgaggggttttcaagatagaactcaaaggcgatttctgaaaattcgcacacaacattcacaagcaaagaccgaatgactcaagactaccgcgtataaagaacagtctgtcagccccacgctgtaccatccataccccgatccagcccagcacggaagcccggctttgatcacgagcttctcagatcaaaattagacctcgacatcaattatgggtacgtttacgtttccccgaccggcaaagaactactggagaggtactcgaggagcagcagtcaaggctatcgagtactttacaccgcagatgtatgtcttatgcatgggtacaggtcagtgggctgtccttcgagctagacaaggactggagaagcttttgacgcgagagctgagaggaaggctgaaatcaatcttcgttctgacgttgtcgcaaagggatcctagcagtcttgctgaaccgaaacccttaccaattccaaggactcggtcagtcaagccaaccgcatgacgctgagtcccgtaatcgtagacgccggttgacatccttcaagttcctcgcagaaactatctccgtgatcgtctggctcctcgaccttcttctcttcaccgcgattaccctcaccttctttacacgttggatcatgttccccgagccaacacgcaagatgtttgacaccgacgtcgatccgactacttacctccttgcggaaccatcgctgctgctactctcgtcgagcttgtcgctctcatccccggacaaaggtgggataaatgggaatacgtagcatacgctctctggtgggccgtcgtcgcgctggctatgttaggcgggagcgtcgtctactggatcttgatacgggacgaagaagtacatctgggaaacctgagcccgaccttgctctaccccgtcaccggagtcctggcgacgagcgcggctggaagcgtcgtggtcagctataccgggttgaatcagaggttgggagtaggagtcttgatcgtctcgtacctcttgctcggattaggtctgtcacgtcgctcgttcttagcgtaaagcggctttcggacgctgattactcgtttgcgccattgcgcgtcggcgcgcttctcgtaggattcttcctagctgtcctcacccttaccgcctactttactcgccttctcacgaaccaaacccccgacccgaagaagattgctgctcaattcattcccgtcggagcgctggccaatgctgcatacgcgatcaacgagttggggtatgtcgccgggcccaagaagcatcttttggaaggtttcggaaaaggatctgcttcgacagctggagtcggtaagttcaaagagcggcacgaattttacagtcttcgtcgttggtctgcaagcatatcgtgtatcagacagaacgatagctgatcctaccattcgggtgcattgacaggtgacgggatgtacgcagtagggattgtttggagcttgatgacgtggggattcgcggtgtgagtcgattgagccatgacctcttcgtcaacaagcgctgagtcgtgatacttgactcgccgcaggtactggatgattatcggatttctcactttcttctcggacgcccgaaagtccaagttctcgctttatacctggtcagccggtaagtacgatacgcgtcccaccccgaaacgatgtcgagcgaaaagatcccactcgctcgcgaggcagattcgaatcgctcgggcgaagaacgatcagcaacatgggctcaccgaggtctaccctgctcttaacagcgtaccccgtcggcgtattcggtgtcgcttgtacccaattcgcggacgacttcgactcgcccgcctttcgtgtcatcgccactatgatcactatcgtctcggttatcttctggctgttcctagtggcctataccctacctctggtcgtctcgggagagctattactagacaacgacgcgcacaaagaggaagaggaggagtgttgaacggtatggaggctggaaacgggtatatgtaatttgttacaaaaattcaagatgatacaaaatgcccgcagatcaagatcagattcgcctcctcttgtggtcgtggagaaccgacgagtccagcaattctgcccgacggacgcgagagatcggcctcggaagcgggagcggggcctcgaccggggccacgtcgatccagtgacgttgatcaccggtgatcttgctattgacccaccgcaagatcaccgccgaagggtccacccgggtggctggatggcccagccagtcgtagatcgaccaaggtcggtattgtcgatcaccgacggcgggtccggccaagggggtgatctgacccacagcggcgatatgacgatcggcgtttgcgatcgcccgagcttgatctgcgacacgatagaaggaaggcccttacgagaacctttccaggtatctcactcggatccaccctcaatcgcgccacttgaccatatcgcatcgccgcgaggtagatcttggatatcccgatccttcggaccgcactagtgtcccgacatgcgtattgcacgccgttgccgatctccggaatccccacagccgagaagacggcatcggtcaagatcgtgtcgaagatccttcccggttgtagggctaggaccatagccgcgaagtaaccgctgcggaacgcggcaactatctctcggctattgacgatcaccgccacctcgtttgctccgccgaacaggtgaagagccctgcagatcctttgaccgtattcctcggtccgtgcgtccatgcgatgatcctcgtaatcgatcttgacggcattgcgaaacggaaaccccacgtacggggctccaccgtagtacacgtgatgaggaacgtgtaccttgcctttgtcgtctcgcggtgctcgataacgcaagatcgctggaaaaggcacgacgggggcgacgggtgcggcgggggcgtcgggagcaggagcaggggcgggcttgacgtccggctcggcgtcttcgaccttggcgggggcggggacttcgatctcggcgtccggtttttcaacctcgatctcgactttgacctcgacgtcaaccttgacatctggagtcgggtcattgttcagatcagcatacatttggcgatcaaagtctcagtcagaacgagcgtacccttggccttcccctcctccagttcatctacctcgacgtcggccgatccgcgattggctaaggctgcgttggttcaagttggtgcgtatataagtcaccatacgtagaacacctcttacgggaggagatacgtaccttcgttcgcttcctccagttcgtcttccgtgacttcctccagctcgtccttctcggcgtcagcgggtccagatgtatcggctgaagttgggtgggtgggtgtaagtcaaggtctacattgggtcggcaacctacataccttctccagcctccttatccttcggctcgtcttgctcgtcgtcgtccagctcgtccacctcggcgtcggtgactgcgactaaacatgaagattgatttggctccggtcagctggcgtgtacggacttgacgatcgatctggttcgtcaggctaaccttcgtccttgctacctggcgcatccaccttaacttcaacggagatcgaggttgggatagacgtgaccattttgcttttggttgaggttaaatcaagacggtggttgaggttgcatcaagacgatgtatcatgcaggagtagacttgaggatgaatcgaggcgcgaggcgactatttatgctctacgtctgcatacccctgcctcagctgtcaggtcggatcctcaggtgcggatgcaagaatgccggtctccgcaagcctcaaaaccctatatgctataaaggaacaaattaaagaacatcaaggcagaacgaggagggagctcgaccaacctttacgtagaacttacgttatcgtctacccatgctcgtcctgccttgctcccttcttcctgcgcggcgtcgtcgtcctgcctccttctgctcttcgtgccgcctgatttgcgattcccgtcatcgagatcggagtcaagaaacgatcccgttgccgagctattttcgcaatagatcacatgccaggctgacgatcgtgtgccagtacgtgcctttgccagtcttcgaatcgaagttactcgagcacttcacctgatccacaatcgtcgcaagctgctcatgctgggtattgttctgatcgccgtcttcatggctttctcatcgtaggcttggaaagtccgttcgattgccgttatctgcgagaagacttagacaaggatgcctgagctctcgttcggtaccgaacatcttggcactcgcttgacgaaaccttgtcgagtagagtttgagcccccaggctgtgccagggggcagaaatggcccttccgagatgtgccttggggcctcgaaacatgacggcataggcgcgtcggctcgtctcctcgcgagggagaaccagggcgatgcacagcgaccacgactgcgagtttcctgtgtccgtgacctcatgacgtgactcgacgaacgtgtgaccacaggagaggagccctctcgctcggggcgggtcgccgtgtctgctggaagattttcgctcgacgctggtgagcgaaaaactatatattctgaaagtctggacgcggatttcctcttcgccacctctttcccatcctcatcacattcaccttgcgcaaaccaagtcttcgataatcaatcttgaagcttgcagtccatcgataatcataaccaccctcatcaaagacgttgagggcagcctaggtgagccaaaggtagtggtttcctcatcggtcttccagtcgaaatccccgtcatcactttcgcggtcgttccattgtcgtcaaattgagcccaattctcacatcgtccgtttctcgcatcctcgcagcctcttcaacgatatcccgcagtccctgtctcacggcgagacccagctgcctcgacggcgaacggcttcctagaatcagaccggactttcggccatttctcctcacgcaacgtcgagactttgcgaggtatgtcgtagattcttcggaagtattttgcctccgacacgcgtagtgacgtaaagctttgttgatgcgactttattctcacgtgatgaccaaacgcgtgacgcgtcaaccaggacgcgaccgaccagattcaccactaagcggtgtcgctctgcttgctccgacattgcctttcttgctattgagctgacactgccttggccccgccgctcgtaacgacgtctcccgaaggggaggataccgggatatggactacaaggatagcgacacccccattagagtaaccgaagggatattaaagttcagatcgttacgagcgaggtggggcttagcagatcgtctcgtcgcccttcgcccattcccgacggctggactccccgcgccaggacgagcgacacggcgacagcgaagtataccgggtttgtctgtcgcgaccctgacaagccaccaaatgcctgtaccttcgcaacgacagggtgagttctttttggcgtcggggcgatcaatcttgatacgttgttgatgattgttcgatcttctttgaagcaacaccactcgggactcgacttatacttcgaaggccaagatcgcaaaccgatcaaagcggtgtcgtttctagttctagcctgcgttgttcgtgcatgtctaaattcccttcgcctcactgatgcagctgtccccagctttgggtcgtcccaggaagggttaaaagtccctgtccccggcgccacggaggggcattttcaagtgtgcgctgcaaagatgtggggcagagcaggtcttctggttcgcgcaagtgcggccagtcgataaaccaagcggcactattgcgaagtttcccgggatttctgtcgcgtcccagagaagtcaccatttgcctaagcttcgcaacggccacgtgagtcgtcgtggaccggaccggactttgcactttcgctgacaccgtacgcgctccttccccgcgttacagccatcccgtccagctcttggataccggacgaccgcccagatcaacatagtatcgttcctcttgcaaatcgtaagtaggttgtttgcgattgagtgggtgaccgaactgtgctgacataagttttcgctcctagaacatgccacggtagatagcttgtctcgtgagttgtccgtttaaatgtccttcttttgacgcgatgagctgacgttcgtgccgctggcagattgtaccagtgccagatacccgctccccatgctcggtcgaactctccacaagatgagagcccttggcgctgccggtagtcctcctaggctcgactgaaacgatgatgcccgtggtagcccggctccgccacgaagaaggggctaggaggctttgcggggatcctcgtccttcgctgcaggctcgcaaaagtctactctgattggggggtttgatccggcttcttactgtatttctacgtcttcgtcgttgtacacattgtccttagaacatttcttttcgattccgatgtcgatgccttgctgaactatacggggaacacggagccattagctgaataggttttgccagcgattggaacttagtcaaagcttaccatcgcccctactactgctggaatacgacacagcaacccgatcgtggcgcccaattgcggtcaataagagtgccttggccgcgtgcgctatgagtcggtatcgccggaccggtagctgacattacgtttggccggaaggggcaaagtgtttcgcgtgtatcgtgacaggtggcggagcctgattggatagtgctttctcccttttgcgcgcccccttctttgcgcactcccttttttcagatatcggatggggatgattcggctatgtcactacaccccggccgtatttggcggaaatgacttttgcagcatccctcgtccactacaggccaaggtatatctcgaacctggtttcgcaatgaaagggatagagagtgttcgtcagaggtgatatggttagcgtcatcagtggcgcgcacgagggcaaggggtgaacgtttcagcggtgtaagcgacgtgttatgcaggatcgaaagtaatcttattggtgaaaggaggtcttaccgtgatcaaggctgtctcggacaaacccagccgagtgagccttcatcaaggtgtgatggaaagactgagaaccagagccaacgacgtcgactcgcgcgtgtcgaattcagcctcttcgtaacgctcaggttgatatccatagtaaatgccggcgtcaggagttgaggagggcagccatggttgtcacacctggctcggcttggacatactcggccttgagaacagtagttgccatccggtcagagatttataccgaggatatatctgttttgtaatcgcaatcgcctccgacgatcaacacgaaaaaaaagacaatgtctggtgaacggacaatcacaatgcaataatggatatgatcgggagtcgagacccgtgacatctcggtctacttgcttcacaaggctcacaaggtaggtttccaatcgtgagatttgggataggacgcttcccacggtaagaagcaggccaatcgatagagacgcgcggcgtgcgaatgtatcgacaaaaggaaatcgcgcgaggggtcagccaacataccaggatgattgggtttatcctccatcaccttcactctctttgataaacctatcgacatcttcaactctcaactcgaccattcatgttcggaaaccggattgtgttattgaataggaacgccctcaccttgatttagagttcttcgcgatcacatatgaccttgaacaaagatccaaaggaggctcggcgatgaaaccggatcgcatccgggccgagcctccgacgatcatctcaaacatccttgggtcatgcgagactagtcgcccttataaaagaaaaagagcgacagatcggcaaaagagaagaaaaggatcgctagccacgaaaggaaagcggcgcgaacagagagctcgtcgacctgtgcaaacccaagaggaggtttcccgaagcaactgtattctttcggaaattcaatcatttgttggccgtgataacggattgggcgagcaggaaatcactatctctagccatagacacaaaaaagttgaatatgctcccagcaagagactcgaaatggcccactggcaggcaatacggaggaatcgtacgaacatcgggctgccgccaaggaaatagatagattgaattgaactagaggcctggaaaatgaatcaattcggacggtctgcaaaagaaacgtgcgagtggcgtgctcggatattcaaactgaaatcgccagccgcgaacctgtttgacatcatcgacgtcaagcctgacatcaagtctccatcgaggcctgatatgattcggcgccatacgacctcttacaaaatctatcaggatccaaccaagctcatgaattacaaaacgaggacgaagcttggaacgcagtccaccgcaaggtaccaactcgaatctaccgctcttcccgtgcgtcagttacgctacgacgtccaactggccatttgattcagacgagcgacgttcagcttaggatgtaaacggcagtggcaaacgcgtgaaatatagctccactctcttcgacttcactcgaaggtttttctagagggtgaccagaccccgaaaagaacgtttatctcgaacacgcattcttagctcttcggatatcattcggtcaggcggattcgatgtcagctctgactccaacgcgcgatcacgtcaagccttttcttcccaactcttctcgcttgccaacgcacaaaatcagtcatcatgaatagcattagcaagtacccgccctccttcactgaaaactcgttcgtcgtcgaagtctggttcgactacagcggtagagatgacgaccgggactttggaaaatttgcgcctcgagacggacgtggcggcggcggagtttttttcgggcgttgtttccgctcgcttcgtcagagatcaggagccgggagtggatcgttcttattggttctaaataatcttccaaagtggacaatcgaatggaagtttcgaaagtggctacacaccgcggatcgtcaatcaaaatgatcgatctggcgtagaacgtgactgcggacagacggcgtgggagggagggaaataggggtcaccagctagaacggtgacgagccactgagccatcagcaaatcagctaggaacgaataggagcaaggagtccagtccgaacaacaatactacccatcaaatctcggcagacctcaactctagacctgttttaaagcaagcttagattcaaaactcaagtccacgtcaatcccgcatctcctacaaacacacaaaccgtaccaaatataaattcaagatgtcttccacccccgcgacctactcccccgtcctccaaggcaaagctgtctccactggcatgaagaccggtgctactgaagacaagaagaccgatgcgaccgagcctcagaagatcgctgctcccctgaccgcgatcaagtccgtcttgaccccccgaggaaactcctcgaaaagaaaccagtctgtctcggactgtcccgtctcggaaaaactcacggaacgccccgcgaagttccgcaagattggcggaaccggaaagggcaaagagaacgagaacgagaatgagaacgagaatgagaacgagaatgacgtgatccctgcccttaaagtacttcacaacgggaacagcgttatcgtaagcaataactagctagttccataactgtccacagctgatgccatgctgctgtcaacagcctacgcgaggtccggttcgggctgcttctatggcctctcccgctgcctcctccgcagctacgactgccactacgactgccgcagctacgactgccgccattgagactaccgcagatacgaccaaatatgcggctacgcatattcacggttcttatcacgtctaccataccgggaacttggcggctcctcgagatctgccgcccccaatgcacgcgcctcagtttgtccctttcttcgagcacgcagttgaagtcggagcacgcggtaacgtccgaatggaatcggtgggttccgcactggctgccgcgctgtctaaagtggtcgaggccgaggtcggcatcactttcgatgatatttcgacagtggctctgctggaagacccccgagacgccgagttcctcgcgactttgggagcgattttagctaccactatcgagtgggtacatcaccctcgtcttcggccgacgacgaacgccaacggggtcgaacttgacctccagcactcacttcgtcaaacgtgggaggctttgcgagcgtttggcgagatcacttatctaggtctaggtcaagcatcgggtagagtgcgggcattcttccgcaccaaacaagctcagcaattggctgtgcgatggtcagactgcaatctcgagccttgtagcgacaaaggggtccagagccgtcttaagcctggtggtaccttgccgagttctcaacctgacacggcgtctcgttcaacaaggaggagcaagactacccgacgcggtggtagcgtagcgacgaccaagctgcccgacgtcgacctcgtcgatacaagtgtggtcgtgcctcgcgaggaccttggtccgggtcgaagctatcgacgtttttgccccttggagtggctcgtactctcggcaatacgcagtcacaatcgcgacctctacggctgggcaagacctcgcgtccgaggcccgctactgctgaagccggagggtgagccctcgtggtcgttccttgcgatggagagcgatcgcatcagtcgtaagctggcgcgaggggagtgagaccggagtttcctttcttctgtatcattgttttttctgtgtcgaaattcgtatatacatcttagtgaatatcttttgggtctgcatgagattgcgaacgccttatacaactgtcacgccactttgatccctccatcgttcgtacccttggatcatctcaagagtgatccgacgacgtaccaatctcgccgcttgcacgacaaagctaggatcaatggatgccggaccttcatcattctcggccagagtagaaccagtaaagtgagcgttcattgcagccaacgctgcgtcctggcagatggacacgatctctgctccagaacacccgtcggtctaacggtcacgcaataagaattagctcaagatcgtcgagcccgtctgatgccgcatccgtcagccttacaattctggcgagttcgtccaggtccaattcaccctccgtgctcatactgctgagccgaatctcgaagatgcgttttcgggcatcgtgatcaggtggtccgacgtaaagaatacggtcgagtcgtccaggccgaaggagcgcgggatcctaatgcatggaagcagctcgtaagagccagcgaatacatcacggtcaagtgaagcctaccagactgtccggccggttcgtagctgcgacgactacaaccccgctcaaggtctcgacaccgtccatctcattgagtaggctcgtcaagacgccgtcgccgactccggagctgccagagtctgcgcccgagcgagacagaccgagtgagtcgatctcatccttttgagacgacgtatccagttgcttagtatggtatacgccgccgtgacttgacacccaagagcttacgaaaaagatgatcgagggggacgcagctcgagcctttcggaatatttctcgtacggccttttccgactctccaacgaatttgttcagcagctaacggagcctcgagtcagtgattctcatttccccgctctcgtttccccatcgatcggcgactcacctctggacctttcacagccatgaagttgacaccgctctcggtcgccaacgccttcgccatcaacgtcttggagcaacctggaggtccataaagcaagactccacgaggagcattcacaccgagtctcttgaagacggcctttttcgtgatcggccattcgacgcattctttcagtttctgtttgatatggtcctgccctccgatcgaggaccaaggggtcttgggtgtctccaagaagatttctcgcatagcggacggccttatcgtcggcagtgccaaggtcatgtcagagtactgcatgcgaggttcgccgacgttggcgtcgatgtccgagacctgtgcgtcgccggcagcgatccaccggtgaatggccgtagaccctgcttctcgcactaacgctgacaggtccgctccgacgtatccatgtgttcgatcagcaacggatcgaagatcggcttggtcgatgaaatgcggaatcttcgagatcaatatcgaaagaatatcgtacctcgcgtccgcgtccgggataccgatctcaatctcgcgatcgaaccgaccaggtcgtcgaagtgccggatcgagagcgttgggccgatttgtagcagcgatcactaccactcgtggcagtgtgctaggctcgccgtcagcctcaattcccgcttcctcttgatcccgagcgaccccatctgacattccgtccataagcgtcaagagcgtggctacgacccttcgttccacctcgcctgcctctccgccttcacgtcgaggacagatcgcgtccacctcgtcgagcacgatgatgcacggttctcgccttctagcctcttcaaagaccgctcggacgcgttcttccgtctcgccgtggaatgctcccgagagctcagggccgttgacgacaatgcacgaacaccccggggtcgagctggcgatagctcgggccaggtgagtctttcccgttccaggtggaccgtacagcaatattcctcgaggtggtttcaacccgaatttatggtagatcgaaggttgtgagagcgggaggtcgagcaagcctcggacttgggagatctggttggagagtcctcctagtgtggcgtaagccgagaacgaggcggatttagactgtagaggtccgggtgggaagatgttgatgtacgaaggcagagccgagttgtctgccaaccctctagtccgagtagacgcacttgctgggaccttcttcccggcgtccagagcttggtctttcccggtagtcttgctggagatcacgatctcggtcttccaattcatgagctggatatcgatcggctcgctgacgctcaaacctttcatcttggcagccagacttgcggcaccattcacagctcctccaccgccagctgtgactttggtcgacgccgtgatgcccctgatccggtaagacggtactggcacctttggcgagggtatctcgacgatgagaccgggcgtgaggtatttctgttccactacgagcagcaagttcaagttcggcgaaaggcggctcgaatatggagttgagcagactcactcagacgttctcgaagaacggcttctgtccacttttcctccctctcatcgtcatcatcctgagctgtaggtcctttcttgacggtgctcgggtccaactcgaggcggatcgacttggcgaccttgacgacgtcctgactgacatcgatcggggtgacgatgacctcggcagtatcaatgaacgacttgagatgggaagacgacagctgaatatctatgtggaactctgtcagcagacgtcaatcggcccagcgagttgacagcttaccttcggaatcgacgttgaccgatggccatagctgcgcggtgacacttccagcctacaactcatataccatcagctaatggtctcaacgaatcagattcgcttgctactcactgcctcctcgatgctgccttgacattcgggagtcagaaccgcccaggatccagctgcgagcttcctttcccggagcgtttcgacggcgagatacgctcgacagatcgagctgctagacgtctcgctgacatcaccgaatgggactaccgagagtttaaaaatggacatggctacgctgtcaatagagtggctattctgttatagcgtcgtgacctcgtttgatagccattatatatgctatcaaagatacgattgaagtcgctgaaaagctggatggatgacctcggccatcaacttttcctctgcgcgctagctagctcgacctgggtgacccaaccttcatactcacagagctacttgacgagaatcgacacaatctcaccgacttgatccggtcttgccatcgacgaacacacctgaataggcaatagatcactacgtcgagtcactcgttattatgttctctcgctcgaccgcactcctccgatcctcgttgcgaacggcatcaccgctcaccaacagaacgttcgcctcgaccaccttgctacgcaactcgactgccaacgcaagtcaatcaacccacgatgccgaacaggctcgggatcaaggggaacagaagatctatgacaagctgaagaccaagttcactcctaagactctggacgtgatggatgttagcggtaagtgcgggttgcgatcgttaggggaccaggcttcttcaatctcgctgacaaacggcttacttgctattggctcgttcttcgtcctttccttcacatgaacaggaggctgcggatcgttctacgcaatccacatttcgtcacctctattcaagggcttgacgacgatcaagcaacaccgtctagtgaacgagtgtttgaaggaggaggtcaaagacattcacgggctgcaggtgagcacgcttcgatgcaattacgggacctcttgcccccacgatgccaactttcgaaacccgtggttctacccagctcaagactgtgcccgaagagtaatggattcatggctatgcatacgagacgatgatatagagagcttctctcatcgcttatgattgcgatgatgtacaatacaagctacaagcgacgatagctacgatgcaccatgccgatctacgacttaccggaaagggccatctctgtgaattcgccttcgtgcttcccttagtgattgttcaccttccgtcaccggccgtctgggtagcccgatcgaatcgtatccccgatgccccgaccccaggatcgatgatcatcccgagacatgcaaagcgcggtgttgaaatgctagagctcaatgtttgagccacatgtctatggatgcatgaattgggtctcatttcctatgtatgggagactcaacttgatctccagcaatgaattggaagaggaagccggtcttcgggtcagtggtcaaggatttgccctgaaggatggcggagtaggcaacgggggtggaagacatcttggattgatatatgggctcagttgcaccggtcttcgagccagtggagacgaatttgccctgaaggacggaggagtaggtaacgggggtggaagacactttcaggcccgatatcgtagccttcccccgatctcttattgaggttgaactgagtctcccatacatgaggaatgaaaccaaattccagcatttgtagccacaccgattggccctcaagctccagcgtttcaaccgtattggatcccaactgtccggaagggcattaatcggcggtcggcaatgaaaggatattattatatgcgatgctatgagcctctaggtgggtgtccagtcgacaacaggtactggtaaaatacaatcggcatgacctatgaagtggagtcacgacatcctgctgattcggtcgtgcatgcgtaaaaggctcgtgctcggttgcacgtatgatcgacacgaaatgaccgctacaagcgagtctcggtgcggtctctcagaattcgatcaaaacaagattgacctagaatgatcgaagaagttaggacaacatcgtaaaaccggcgacggccgacgactgacaggaacttgttccaaggcccggtcttggtggcggctctctcctgctcgaaagcgtcaatctcgtccaattctcgtcgaccggtcataaagtccatctgaaaaaagaaaaggtctcgaccgtcaatcgaggcgcgcttgtcgcattgtcttgacgcctggacatacctcgctcaatcggatccatcgggttcgcttggtgattttccagccaaagtagacaatggggaagatgatgaccgagaggctgtcatgacaacgaatcatgtcaacgtaagatcagtctgtctcaggaccggcatggactgactagtatgagaaaaagtcagaagtgttccagttgccctcgaggaagaccgagtatccgctgaagaagatgacgatgaggaagaagatgaatccgtaccacgacaagtatggctggagaggggcgacgaaggggaattctcgtcgatcgatgccctgcctcttaagaccgtagtagaatcggaggtacgagccgaggatgacctgcgaacgattccgagcggttagacgaaaatccacgacgcagagagctccgtgcggacgactcacgacccaagcaatcagaccggtcgaggcactcaggttgtacaaccaggtgaatacggttccagcggtaccggtgctggtacccatgaaagccaggagaccgagactggcagtgaaagcgatggcgtagacgggaagaccgccgggagtacacttgcggaagatcttgggagccttgtgttcgagcgaaagggccaacagagtacgggatgcggcgtactgtggggtaaggtaaggtcagcttgatgttcacggtcagagggccgtccgaatatgacgtacgacatccgagttggcagcagaccaagcagcgaccaagacgatagcgttgacgatcgagggcaagaccttgattccagcattggaaacggcgatggtgaaaggactactggcagcgttaccagtgtcgctcaagagcctagggtcgtcgtaaggcacgatgagagagatgacgaagattccgaggacataaaaggtgacgattcggaaaaagactcgacgaatggcacggggaacggctcgtcgagggtttcgggcctctccgacggttacggcgacgatttcggtacctgcaattagaggagcatctcagtacagcttcaaaagtgcgatcgtgatcaagactcaccgatgaaagaaaacgccgaagtgatgaaggtggagaaaaaggccaggaagctgtaacgagagagtatcagctttggccagtaaagattctgcgtagcgagtcgacccactgtccgagcgatcctccaatgactttctctccttggttggtagtggcactgttgaatgggccgggactggacaaggtggaattcagattagtacatccggatcgtcgcatgctcgtcaaggcaaactggcactcactcgatccagtatcggaacccgatccggtctcctttaggaccaccaccgagatcgatgacgattccgaggatgatcaacccgacgatggcgaggaccttgatggtcgatccgataaactcggattccccgtaccacttgacgcccaagaagttgatcgcgcagaccaagacgaaaaagatcgcgatccaaacggccgggtggaccttctgatcagggtcccagtaggagatgacgatggcgatggcggataattcgacaggagtggtgatggcccacgagtaccagtagttgtaaccgagagcgaaacccattgcagggtcaacaaatcgggtggccatgtgcgtgatggctccggggacggggaaaagggtgcacaactctccaagggcgaccatgacggcgtagactccggttcccataataatgtatgaaagccagacaccgacgggacctccctgggcgagggcggtaccactaccgacaaagagaccggttcctatggttccaccgatggcaatctaaggtagtgcgtcagtatgtattcgatggtactgcaaagtaacgtcgacgcaccatcgccaaatgcctctccttcaagtttcgctgcaccgcaccatgctcgctgttagggtctacggaagtcacgctatcagtctcggtcgggcgacgtcacaagactggagatgcaacccgactcacccaaacccaactgcgccaacttggcctcgtattcgggatcccctcgaggcggtaccccaacaggagtaacggtcccctgggtcacctcggggaggtcgtccaactcgtaatcatccttggatggcttcttgctctcatatgtgctgcccggagccgacatggtgagggtctctagagatctatgtcgagtagtgactgtcgatcggctgcggtgcaagtcgccggaaccctcttgagcaagatcgaagcgtaatgttattataaggagtcctcgagtcgataccgaggcatggagggaagtggctccatcctgccctctcgtggcccgcgatgataaggaattgtacaaccttttttcggcacacgacaagggtctggctctgtggggctgggacgcgagaccgctagtagcaagcgggacgagtcattcattgcctggctttggaaaaaaagagtcggtcgggcgatcgggattggcggtgagcaggagcagcgacgacaatgccgctccgctttttacgctgttgcctctattttcggttacaggtcggctctactaggtagcggcgaggtggatcgcggggcaaggcaggtgatgggcgtagtagtgcctggatcatcccgactttcggaaacaatcaccatttccttccgagcaggtcgtcgtcaggtcacattcctgatcaccgtaccatggcatggggaataccgtgggcgaatgacgatacggttgagtacctcgcccagcagccatggctgctgatcctaggtatactaggtgcgttccgggcgcaggctgagctcgagcgactctcggaatcgtactcttcatggcaggcactacgcagaccaaagcctgccttatcacgtgatccagacaagacggaattcatctcacaagaatacacgacatgaccccgacctgcaacgtgaggcttttccgatcaatttgcgagcgacgagtggcttgaaacgcatgctgggctcttggcaaatacgagaactctctggaggctatacgaaagatgatgaataaaaagacggggacttggcgtttcgcctctgcgacaggaggaaagcagttgtaaactcgacgaccttctatacatttgtatacgaacgaccatcatgtcacgatcaggcgcatcaacctactgactactggatgttacaaatctcgtcctcgtccgtacccccaagtctgagtttgcgaccgtacgtcccagtgatcggatcgaaatctacttcggatttggggatgtggtcggaggacacggatgaatcccggctctgggctgacgcgcggtgaatagtaaagtggagggggtggagggagggggggcggactccgagtcagattcgtagtcattccagtgttgctgcaagggacaaacctttgaacagtcgtttaccaggagaagctggtcggacgtgatgcgacgcgagaggcgggtttcctcccgcaccggccgcgtcgttcaattgctctcgcttgcctgacgatggtctctcgtcatgcgaccgagtctccacagtcgggacatgctcacattctcgcttgaccctagtatcggacacgctcttgtcactgtctgtcatgatcagatcccgtggagactttccagtgatctagtgataagaaggggatacgaaagtcgctgcggtgtcgagtgggtatagtcccgtcctccgctggactagcatctcgttcggtcattgtgccttgagagctcccgttttatcagtcgagcgccgatacttgtccatcctgatctacatgtcctgaaacgccccttctcgctcacttccaattcgtatgaaaggaaggttcaggctgaagggatggcgaccgacttcagcggagcaaaggggtgtatatcgtgttgatgatgatgaatcgtcaacaaaagcgcgcccccttccccggttactcacccgtaagcgccagtaaccggaggtgcatcatggtcaatctcgaatgtcatctagccttataacgtcgactacggtgtcacattccttcaagtcgatatcacgacgacctacatctccttgtcaattctactcatcagcgtctcctcatatcaccttaactatccgcaaatctcgcactatgcccgccaagaccaacacccgtatcgtcctccaatcccgacccaagggtcccatcgagcccgagaccttcaagaccgacaagtccgaggctgttcccaccgaaaaggatctcaaggatggagaggtcgtcgtcagggtcatgtggatcagtctggcaagtcctggttctctttcggatgtatcggctgagctgatagtagtcgggtgtgatgatacaggatgcttccatgactacctggttgaaggagttcaggagtgagctcgatcttctcgctcgggcagcccgaggcctctttcggagcgctaacaaacctataatattggatagactaccttcctccggtcaagctcggtgctgttatgagggccagtgctgtcggcaagatcgtcgcttcgaagtgtccgaacaggaaggttggccagagtgtacgtaccatgacctccatccgtgtacacttccacctcgagctcattcttgtctgtggtgggaataggtcgaaggaactttcggatggcaagagtgagtcaacatgccggtctcttggctcgacatggcgtcgatactgatcctcatccacacctggcagatactggaccggtccttccaagcataccgaggctctcaaggcattcgagggttcgaccgagagggactatgttggtcctttggggacttctggtgagtgttcccatcgtcagtctgatccttcttcgctaacgagcgagtgatgatttttcgataggtttgaccgcgtactttgtgagtttgggcgaccccgccccgagtgtgccaggcaactgacgatgattcccgtctgtgtgtatagggtctgatggacatcggaaagatcaagaacggcgacaccgtcgtcatctcgggtgctgcgggaagtgtcggcatcgtaagttcggccgcttccgtcattcgggtcaccttaaacgttagctcacgctgtaacctccgccaaacgcgacactccagatcgtcacccaactcgctctcctcttgaaccccaaaggtcgagtgatcaccaccgctggatctcctgccaagtgtaaacagctcaaagagatgggttgccacgccgcgatcaactacaaggacaaggattggaggaaacagttgggaggtgcgatgaaggacgaaaaggatggcaagaagggtaacgggtgggccgatgtctactttgacaacggtaagcacacgtgtcatttctttcaagttatggcggaccgaactgactgtctccttccacgtcggacagtcggtggagagatgctcgactttatgctcggacgactgaacgaattcgctcgaatcgtcatgtgcggagccatctcggactacagtaagcaggtccgacgagacgtattgaccaatgaccatactgatccgtcttccttagactctgcccagccttaccctatccgaaactaccaggctttaatttccacaaagtcgaccatgcaaggcttcatcgtcttccagtttgctgagcgatacgatgagggccggaaatacctatcaaagttgctaaaggatggcaagctcaagtacgaatggactgtcgtcggggatggtagcggcaaggacaagggcgtcgaagcttgtgtcgacgggttgcaaggtctttacgagggacgaaatgtcggaaagacgtaagtcgattaaagaacctgaagatcagaaaaagcctcgaaactgaaacgcatcctctcgatagagtcgtcaaggtatgggacggaaacatggccgacgaaaagaacaacagggagagcaagctttgagctagcgcagtatatgtatacgaataatgacagcgtcagagatcacattgagagcatgcgcactaccaggctctggttggcgattgtagaagaccattaccatgttttgccaatcaccgaatcggtgcacgtgctggacttttcctttgttcaggcgctttcgagctgtgccacttgaacgaccacagcttgaaacagtcgatggatggacgaaagaatctgttgatattaaataataaagcacaaaaagagcggatatcattcttacgacaacaagcgaaaagacaaacatcaaaaagtgcggatatggcactaataatggcatcggacaaatggggtttaggggtacgatggctagctggtcgtcagtttagtagcgacgagggtgttgctcttcagaggatgggtgtgaaagcacgtcgcgtgagtcgcggctaagagagacttcctctttgggacttgtatcttagttagacctctagatgaccaaccctccctagtgttctcatggagacgcagactggatagtaatatcgcttggcacaagcccttctctcaaacgagcaataaatcgttcatgccagatggtttggacgtggcgctcgtagactgtctcgctaccaaatactctgagcagctttagcgaaaagttacagattgattgcgttgacattgtcattgtcaatcgatctcacgcatgaaaagaaaaagttatgcagagcaagacggacggtttcagcgcatcgcagggcatgctgtttcgtgtctgtgcgacgagaatgtcatcagcccgatccggcggattgttgaaaaccagtcgccatgcgaaacaagtcccttcctccgaccaaagctagacaagaactgtttcacaaagcatccttgtggtgaatgtacgttgctggatttaaacaaccacacgtaaacaggacttcgcatgtaagatgcgcctggtcgagatcataggactgctggacaatgaaatcggtactacagacgatcggacgtttaaattgcaaagcacaacagcattctaagcctcaccatagatcggaaatgatacaattgatcgaaagtcatgtgatatccgtagaacattccactgcatgcggaaggactgaacgtacgcatcctcgttctgtgcatattgttggtcgtgacgtttgaccagagcgagctcggcagcagtgtcgctgatgtccatgcaatgaagaactccgtatgaaccgtacggttgatcttatcaagagcgggtctcggtgatcagacttcatgagctcatccgccttgtgagctttgaaaatagtcgcgcgataggctgggatcacagagatatcgcggtgtctatcaatgctcgaatgacatctgcccatgggtcttccggtatccgaatctcgtcgacccacgcatctacctaatgctatatagatctggagactctggaacacatgtcacctactatacaatcaaggcgcggttgaagttcatctctgtggagtctcgtcctgatttcagcgcaatagacgtgaaccactcctactaagccaaacgtcgcgcgcgcacaatcgaacaacgcttgaaagacacgtagcaggtagcatccccgatctatattttcaccgtgggggacagcggatatattacacaaaaaataagaggaggatccagccacactgctttcacatctttactccgtcaaacacctacacagctgaattgcccctgcagaagctttcaaccgggcctcaagacgattgggaacagcgtctgccgtgtcgaagttccgcaaacccaaacgggcaataaagatgcgacactcgtgtttcgaacccatgatcgtttgtgcaccaacagtaatgggctgtgatgtatacacctagactactgcaccacaagaactgggcagttacgaatgctttttgtcggattacaagggttgaatcgacgactgtctcgcagaccttcgccgacggtaccatgtcgattattcactatggtgtactttgactggtcactcacgttcacaagtgtttttttttccgcatgattgactcgtgcgcactgcaacatgcttcggatcttcctaaaccaccaaatcaacccatgacattccgtctagtcgcataccggtgaaatgacggcgtcctttcgaaagaaaatttacgacatccgatggcgggatatcccaaaacggcactcgagtaaactaggtctgatctctttactgcgaacggcctatcattctgaaggtagcgtcatatacgtccattcggacttgcccagtgttgccaccttctttggcgtcgtctgtcgagcgggcccccgatggttgaacgcgtcagattcgaccaaattgtcaacaacccggtcgacgacgtcagagacttcgggaacaggatagtccttttgctcgaagcacaagcttgcaatcagctacacatcggcactcgttgagatcgtacaaacacggatcatctcaacttccagccttgagcgcttcatggtaccaatttcgacttcgcaacggtacttgtgacttgtggtggcctaattagaacggaggggctagaccggtcaaccgccgccgatctgagctttctgcaacgccatgtcaaccgggctcgtctcaaaggagaattgttacgatgatattctcgactgggctaccagaagagaagcgttcgtcaagtgtcgggtgtcggatatctatcgtctgcgggcaacgagaagcttgagggggtccagtaagctcaaaccgtacaccgggtccccgacagctcgagctgacaacaccgtcgaaccctgatcgtagatgacgggatcttcttcctcgatcagcaaccttgccgagtggttcaagtcgtaggctgggtctcggcgatctcgttcgaactcgttcagcgggatgcgtcggattcgggtgtcaaagtggccgtaaccagtgcgttcacagcttggcagtggcctggggaccgtcagattagctgatcatattttaccggcttcgaatcagtcgacgatcctgatggtcaatataatatcacagtacacagaaccctaaagaccaagccccgactgaactctactcagtctgctcgcgaaccagcgaccgactcatccaaaccggcttaccgctatgtacccaagtacaagccagctcaacctgtcgtaagaggaaacatcggaccgtcgggacctccaagggatgaatcctctggaaggacagtcaccgagaccaaacaacccatctttccgtgtttccgggtcggagatgtcttacgggtcaaaggcaagatcaacgaatggcggcgaagagatggaagagtgatcagagagctgaacgctagcgaggcgactggaggagagatcggtacgtctcgatcgttatcactgatctttggacgttgctcatgcagagaataatctcgccgaacatagacatcatcgatccggctcaggagatggaacacattcgtcaagtggaacaactgcgattgagcgttttcaaccgacctttccagattcccgtacccgacctgctcaaacagccaaattccaaacctaccaaggtcggcaatgccagcgatactggctcgcccttgaagaagcgtaggctcggagcggagcctagcagcgaggccgagatgggcgggacgatggggatgagttcgacagcaggttatggagatcgggtatgtcaccggaagcttttggactttagcgtcagcgataacatgccatattgacccggctcgagtagctccgtcatccactcaaattgcataggaaacatcttaccatgtcaacattcacgcggtacctctcttcgtacctcgaaaggatgacggaagccacctggtctactccacttacaaggatcaataaggtcggcgatcttgaatctgctcaagtcatcgaattcgcggccaaatatttcccggaactccgctggccgccgaaagagatgagagcggccatgcggagacgcaaagaagctcgtgaacgtgattccctgccaaccctgccgctggaccgggtaagatccgggaaggacgatacgcccaaagctcacagggttctccgcacaaacttgacgccgaagagggccctttcctcgggatcgatcgcgattgatgagaattcgaacagctccggtggatcgacgatcgaagccatctcgggtgcttgcagtctggaccatctcatgcacgtggaatacctgcgggatctcgcagatcgagtgttacgtcaagagtaccgccgtcgaggggaacgtcggagagccgagacgctcgcgggttcgagccgggaggaagagaaagccagacagaaggcagacaaggaggagtaccgccgagagagaaaacggaagttgagacgtctattccgagaggctatccgcttaaagatgatggaggaaggcagtatcgtcgaggtggcgcttaccgaggaggatctgctggagcaaagggttgagagggaatcacgaagactgaaaaaggaagcgagcggtctagactcgtttgatcagggttgggacgccagtttcgcgtctaccctgtcgcacagcgtgttgagtgagaagaccgatgggacgaatgcgagcagcatcacgctagctccgaggtcaacgctggggcaatcgcggattccttgcagccagaaattgttcctcgccaaccgcatgtttcctaggcctgccggactcgctgcggttggagacggatcggacggatccgaggacgagcatcggaatgtcaaggacggtcgggagaaaatcgagaaagccgatccgatcggatacgtttcgttacagtatcgggtggttggcatcgccatcttacacgtcttgcacctcgatgcgtgggaacgaaccactcgttatatgccagcgagagatcctcgttgcgataacggacctagcgtggacgaagtgcatcgacggatatctcgtctccacgagaggtgggagagggtcggaatcgacgtagtggatgcagggatcgaggatcttgttgggaagggattcgtcgtcaagtttggcaaaggatggaaagccgccaagagccggttagaggagatcctctgatgagacgatgcccgtctcggctggccgcctagtgaccgattccctagtacgatatctctgtctctttaccatgttataataataccagctattgcatatgctagactagagcagacatgcctgacagctattggacctttaggacgaaaagatgacggcatcgttttgtttcgacttttctgcttccgacactgaaataaaagcttccgatcacttgaccgaccatacggacttgcttgccatgcactgctgatgcactttcaggtcaacatgatcgacaaaagaatacgaactgtacgagctgatcctacgaagggatagcaagaagtagagagtttcgagttcgcttggggtctcacaaagttgcatcaggtcttttccagtgagcccgtcctgaagcgtgtcgtagacagctcgtgctcaaacctcgccgttgccatcgtagatcaaatcgccttccgataccaaaaccatctatctgttcaaaaacctgtcgaactgtcctccgaaattcgacatcactgcctttgatccgtggactcaggtcacatgcccgagatgagctctgtgatgtcgtcaccaccgccactggcagctgcagcggagtctcggaaacgacgtcagactaaagctcaaaaccgtaaaggaccttctagccaagtcttgccgggcgctcaaaacaacggtagtaccatcgggatcttgagtggcaccagtaaccgcatcagtaatgaccaatctcgaaccgttaagattgaaaagggggatagtccaacggtacacctgaaccacaggccaactacttttaccgaagctcgacccgtaggcttccccaacaactcgttttccccagcccccgccgaccttcactcctcgaacctagatcagaaatctatcgttgtatccggcaccgaaccgtccgtctcgaaatactttgatgagcacggtccaaacgacatgggcaataaggatggcgacaagcgccgaggcaagaaaaggcagagaatcggaagcgatggagaggccaggaccatggctgaggagaccgctggcaaaagcaagaatcatgaacaatcatcttctgagcatcggttttgctcaccacaaataaaggtcgaggagcaagagacggtcgacaagaagcgtgacacgaaaaaggcaccgacgaagaagaagggcaagtctaggtcgcctctccctccagcacctatcgatctgccaggactagcgggcagcagcaaggaaacgatcggttcgacagctacgaccgacaccatatcgaatgcttctacctcgagttctgctcaaactgcacgacagttggcggaacgagctcgagcaatgaaagaacgagaggagttgacgcagatgcgaaaggacaaggaggacatgggcaagaggttagacactgtcactggcgagcgcgatcaagcaaagcaagagatcgaaggatcgcgaaaggaggttgggttcaagaatgaagtgagacccagaacgcaagctatcgtcgcttagtctttgcggatagctgatgaacgttgtccatagatcatcaaatcgcaggataaaatcctcgaggacatcaaggagacactgacgtgcaatgtatgtttggagttctttacggatccgcacacgtacgtcctaccacgagacaaccctgctaatccgggcactgattctttccttgggacagaatcgcgccttgcggacatacctcatgcgctgcctggtgaataacccacataagctacgaatagcaagctaccgctgactgctgaccgctttcccctttctcagcttgttgaactggttcgaatcgcccaattcactcgtatacatggtcgaccgcgatcacggacaagctcgaaatgcactcttaggcaggactcgagcctgtgctacgtgccgcaccccggtcgttggcaagcctatgtccgcatatgttctgaacaacctcattgctgctgtcaaacctcgattgctggaaacggccggaacagcggcttcacaaggcctgtcagctcgtgctcaaccgaaggaagatcgcgcaacgatgtgggatcacatcttcgagaccgaccctcctggcaaccgaaggtggcacattgacgaggaggatggcggcatcgcaagatgcaacgagtgcggaaacgaggtcgaagatcaagaatgcaccggatgtggtcgatactttagcgatctggacccggacgatcttggagattcgatcgatatagcgtggaacgatatcatccctcctccacacgatcatcccgactatgatgactggatgattcagcatcccgatctggatgactttagagccgacttggatgggttcgacgatgagatgtcgatcgaagacggtcgggttcgattcgatggtgagccggtcgatgaaggtcttgggttccatgcggacgatgaaccgtacacaaacatttcgacacagacgatcgttccgagggcttctcaggcgaggattctgaagatgacatgtccgacttcattaacgacgacgacgaggaaccctcgaatgcaggacgtcctttagaacccccgatattcaatttcgacaatgccacgaataggcgtgctggtcacaggtaagctagtctaactcacaggttgtggggccgtccgcaaagcgaccgggccactgactttccgacccgtcttcatcagggggcgccaagctggccctggctcggccgtcgccagtgagaacagctctgatgaggatgataccgtgattcatgtccgtcccaacactcgatcgagtcaggcgcgacgtccccaagtcatcagcagcgatgaagagccgggatccgagtaagtgctttcccggccagctagaatataagctcttgcgtgctaaacctttctggaacacgtatagtcaagagccagtcgctcaacccagcctgcccagaagtgggaatcgtcgccgtgttgtcgagagtgacgaagacgacgaggatgagatccgatatgtcggacatgcacgccctatctttcaattcccgccgatccacctacagaatcctggggcttgggaggaagccgacgtctccgaaggcgaagacgacctcagtggcgacgagagcgatggttacggacactaccgcgacggatattacgaagactcggatggcgagatctacagcgtcaacgaagaggatggagagttctcgggcggtgactattgaaaatgacttaggaccgggagaagcgatgtctgcagacctggtctcacgactcgaaagcgattattaacgatagcggcgtgaagccctggagcttcggtcagcgatatgaagaacgatgtgctgtcggatagtcaaagccttgtagcttgacgtaaatcacgattttcttgtacaaatatgctgttctcatcagtatcgaaatgacgacgaattcataagaaagctctgcatgactgattagagtcatctgcgtgtcttcaagttgcagattaagagaccaagctccagatgttcgtatgatgtatattctaccaagtacaatcgggttgacttgagcttgagcacaggccaagctgatatttcctgtaccaggttactgtatcgtgctcatcccgtatgaatccgatcatgcacttccctcatccttcaacttcaaggttctcgcccatccgtcgacctgctccaccaacttgtccagagagatggcctcctcatccttcctcgctcgcctagggtaaactttgcctcccgttttcgcgagcgttgttgtcgacgacgcctggttggcctcgatagggatcgtttctaccttgccatcgacgtatccgaccgtgatctcggctcgttgtgcggtccggggaaggatagagacggtgacgttgatgttatccgagggagaccctttgatggtaggttttggtagggatgtcgtgttcttcggcgtggacaagagggagaggaggagcaagggtgatcgcgatgtcgaggcgtggaaggggttcagtgcggcatggatggctgcgacgcggggaatacgagcgtgatagtcagctttcggacctcgttgcgatgcaaaatgcaagcattctgcaagattgtcacagcggaatggtcatgtacttactgctgatatgcgagcgggtcaatcggattccaggagccatttttgcttcaagcagagtgtcctcgagtatgggtccgttaagcggggttttgtatggcgttcgagtggatggtgctctttcgactttgcttctatgctttcggggttcctgaggtgcaatattgctacttgaaatggatgaggtggttgatcaagacgttcaagacgttcaaaactacactttacctttgtccacgatctctagtttctactacttttgacttttgcggaatcaaattttgaatccgaaaagagcaatcaaccccggtcaacggtctagctagctagttgagtaccactctgctaacagccagagattgactatcgcttcgagttgcctatcggctgtctgtgacacttcagggcaaaggttgaggaactggatataccgcaggcccgaatcaaatcgaaagctgggtgcacctgacgatacctggagcaaatcgagcttcatcgcgtctactatgaccatgacgtgaaggtcgagatcgttgagccaacatgaatcgcttaacctcggctctttccgagtaagccggctgagatctaaattccaatgccatactgacttctagccgtgcgcattggattctcagggccagcatggcttcaaacctgtcgccgggtgaaggcaattcgtcacaccgaagtctctatcgagcttcttccctggctcctaccgaggtcgaccccgtgaccgcaacatcgaatctatatacaccgttcctaggagatgcttcaccgacacctcgagccgacttctcacggaatggtcgtcgtcgaggtagtcgtgaaggtggaccgctcgattacctctatgacgatcccaggactccttactttgaaaatcgtgtccggcaggatgaaggtcgacatggctggttacatcctctgcccgggagcagcacatcgacgtcggtcctctatcaacatcagagagagaaccgagccagtcgggcgtccggactaggttttggggaacagtccagcaatacgggggaactgacgacacccggggatagtccagctcaagctcagctgcaacatcatcgagcctccacctacagcctgaacgacccggtcccacaccattcttcctccaactcgacgaggttttcctcctcttcctctccccgctttcctacctcaatttcgccggtcccgcagactatcaaacgatcggaaccggatagattcgtcaaggcggtcatcaccgctcgacctcagccccatttgacgtcgtccttctcgacctcttctacttctccttctggattgggcagtatgcctggacaaaagcgactgagtcggggtgcgggatccgcaaattccttgggaagcgggagcagcggcaaggggatagcgctaaagactatggctcggggtccagatggccaggttgttgtggtggggaacgaaggtatgggtaacggtagcgttttctctagggctgttagactgaagacgcatattcgcagcgttgaggatcttgtcgatcactccacctcacgctgagccgagagaaagcgggaatgcagcgacttccaagtcctcgaaacaagccgcgtcgaatcagcccatccggctcggttcgggaccaggcgggtataagatcgatcaggttctggatctttggaaaggcgtcacgcttggcggggcaagtcgaggcggtcgtaacagtggaggaagcggggctggtaagactatcaatggggtcgactggggcactgccggtaaatatctccagaagaccgctcatgtccggaaaatcatactgatttccgctgatttgacactcagagtctaacaagaagatcctaactgcatgctcgaatggaacattcatgatctttgacgtcgagcaaggcagacttggtaagcgcacgagctcggcaagctaccgccgctgcgctaagcgattccgatgtgctggcagacagggagattcaagctcattctaggagcatgcttggcctaacgatcaacaaggttccaggtcagggacatttggttctgacagccggggtggaaggtctcgccaagctctgggtacggttccgcgttcttgagccccaacgtagagatggctgacatcgcgtcttactgttgctcctgtacaggaccttcggcaatcaacgaacaaggtgccaatcgtttccatccgacaccccgcttcaatcttttctgtcacgttctccccacccgggttgcaatcgacatcgtcggctaacgcatatctgttgggcctcgacaacggatccatctttcgatacgatcggagaatgggtacgcgtagtacaggtcgcatgacagctgcccacagcaacaaatctgtcatggcgctggattggaaagaaagcatagacggtgatggcaataccggaaatggtggctggctggcaagtgccggcttggacaagactgtcaaggtccgtagcgaatactttcggcataccgaaattcacatgctgaaccatctttaatgcaatgtcagatctgggacatgacaccttcagacggtccgattgtaccggttcatctgattcagacgccttatcctgttcggaaaattgcatggcgaccgggtcatcagacagagcttgcagtgctatcatcaccagacaccccagtgaccaagcggcctcaatctatgacggacgctgtctcggcaattggcgaaaccgaagagactgaagagggaacagtcttggaagagtcccgtctagagatatgggatgttcgacgtggtcacctgtcaaagtacctcctcggcaaagctcccaggcacaccgaggctggaggtggcacggtaaccgagatatcgtgggcggatggcggttctctccaatcgacatactcgaacggcgcttttgtacagcacgatattcgacagcactttagacccttggatcatctgccaaagcaagtagtggcctggagctcacgaggtgaatctactgtggcgttggatcgcttctccaaaggcgaaatcccgttcgatgacgtgtgagtagatgcgtgagcggtagcgacgtggctttgtcccggtgattgatccgtgtcaatcttttatagcaaggaggagtaccttcaacatgcccataacgtcggcacccgaatcaaaaccttggctgataagccatttcaaacgcgtcaggcctgcaccacaatatctctgccattccatgaccccgaagtcttccgatacctcgctgcccaatataggcatgggggtttggtttctagggagcagtcggctagttgcacgtggaacgcatcggtaagcactgcgtgttcccctataatgacactttaagctgatattcggatgtgtaggttgcagaggaggtcgagcatcgtcaggctgttcacgcctggaacttgcttgcgatcctgctcgatgtagaattggagagcgttaaacagcgcgtcgagcttgctctcgattctactgttacgaagcaagcacaagagtattcacagcagatgctcggcaagcagcaacttcgcctgccgagctcggccaagacggtgccagatcgtacagacgcggtcgatcctcttcggacgccagggttgaacccggccaaggcgtttatgcccttcgagaccttctcaacccttgcggtccctgaccagtcgctgcccatacatccagatggtaatggaggaggttctgcgggatcaacaactcctccagcccacctgtcaggatcgatgcatcgaagcggcaacctgcatcctagtcagatagaggaaatccggaacaaacttttacaaggagctcaatcgttgccgcctgaccctgtgcgccttataccccagcgcgaagacggcgattctgattcggaagaggaggaggaacgactttctagcagcattttggcttccacgctcacgagaaagtcacgtccgcaattcatgagcccaccggtcaacggggaaggcaattcgcttcgacgcgtgtcgccggcgcacatgttgcgtttggaccggcgtcggtcgagcgggttgagcatacctgaacatacgaaacgaaggctggcaggcaagacggatcttgattcgcaaagcctggacgaaccggccagatctcaggcccttgcggtcgaaaattgggtgaagactttacgagccatgctgagccaggctttggagacggcgctgatagaggtcagcaggtcgtccgatcgtgggatcgtacaatggtcgttgattttatggttggttgctatagggggacatccagctggccgcgtgtctgctctttgtctctccgtctgcctttgatgccgatcaaagccagcaagcaagaatcatcgagtcctacatcgagcttctggatcgccatcgacttgccgtagtttcggcggatattcggtcccgaatcgagcagcttcgccagtctactcttgtaagttgctgcgaaccggttatggctctgacactcactgactggcattggcgcaaatcaggtggagacttcgatttaccttcgatgtggccggtgtagaaaagcgaaagagcctgaaccatcagctaaagcatccacgtcggcttggtattgtggtgcttgcaagcaagctctgacgtactgtgtcatctggtacgtgaaggacgggcgatcttcgcctttgaaccctcactgactttggtctctcatggccagccgcttgccggtcaagggcgcttggcggtcatgtcccgattgtggacactccggtcatctggtgagtctgaaggggaatgcccgatcgggagcaagaactgacgtgctctatctcttgtctgcttgacttaggcatgtttgcgagactatgtgaagactcgacgtaagcatggcccagcccctgaggcagctcatctgctgaccccctctcccatcgaaatcgcagagagcatggtctgcgtgactctggttccaccgaagactccggcaaggcgatcggattcgccggcagattctcagccatggacaaccgcgacgaggcggagaggatcgccttccccagcccctgatacagaccggcgacttggcgtgcaacaaaggacgcagagtgccctcaacatgtccgaagggtatgacattgtgcaaggagaaggcgacacagtactttgtccttcagggtgtggctgtaaatgtaatataggttgacacgctgtcgggtctttcgaagttgtacattcccgctcgtcggcgtgtgtatacacagtctggattacttctgcctggtgctgcgattcgcattcattggccggcgtcgcttgaaaagactgttctgctcgactttcggcttcacgtcatcctcatcgatatcaggcttggattcctctttctgccctgaagctttgtcctcgaccgggggatcaacggtggactgacccggtacgtcttgctctgctttgacctctgttgaaccttgctcggccttgatgatcggtctcccatcgggtcctagagtaatccccttccacttttctcgattcaaacccttctcctcacgttcccgagccgctctttcttcctcctgacgcttcgtctcctgtttgaatctcgccttcttcaagagctcgtccgggtcgaacccttcgtcgtcgtatacgtcccgttttcgccgcttgctcgatggtcctgcttcggccggagtcgtctcaaaggcaaagttacgaacgtcctcttcttcgagtaggggtacgcccgatgtagcctgggcaatctctgtatcctcctcgacgggcggatcgtagacggctacggtctcccactgtcccgcctgtccgaccttcttgcgttcggcctctgcagcttctttcgcagcctcgacctctgcctgcgtgtcaatgtatccgagagaggccgctgtcgagtagttggagaacttgtcggtcttcttcgggggtggaggtggtgctcgagtggatgaaggacctggttcggaatcgtctttcggttgagctgcatcatgagtcgcctgtgcttgctgcacgacggaggtgatcgacacggtcagacgggagtcccgagtccgtaagggcaaaatgtcccactcacctgctcgatcttcttcatgagtcgctcttcgttctccttttcccttacagatttttctccagtcttgtagatgttacgaaggaaacggtccttgttgccctggtgtcgaagaccattttcatgatgggatcgagactaagtagattggaacatatgagctcgagtgatctccggtctacgcagtcgatcatgctcggcactaaccggtgcatcgtctcggataaagacgttgcagtacttgcaccagtattgcttcttggatacccagaacctggcggcgtcccgttgtaattagcccggtggagatcgtgcgatcgaacggggagactcactctgtcatgttggcagacaggcagcttcagcttgaacagcagcgaggagaaaccagttgcgaggtgtatcgtactcaatggcaagtgagtcgaaccgtctgaatcgatcgtaacgaggatatgaacgtctagggcagctgagttccgggccagagccgagtctcgtcgcgcgtcgatactcgccatatgcatagactcggcctggcgacaccaaagcatatggtatggtagacggcgagacagagccgtcgagtcatgatgtgcaagtacggcgacgagcggttatagcttaggagaccgaggaggatacagtacaagttctcgggctgtgagaccccaagaattctcgaaacccagccgcacagccggcggacgtgcggacgcctcaaggaaacgcttgaagtcgtcgacggctggaaccgtgtcggcatcatcggtccatcgagctcatccatcatcctttcgtcggaagtgaacaagagagtgtgaggcttgtcgaggtcgtcccagtgggctacgggacgatgacgaatacaggtcgacacatccggtctcccggtctaggaaatgtcggcattgggatgcgtcgagccagcccaaattcggattgatcctggataaccgattcgtgtccgtcgaccgcctgttgaagccgggtcagatacacacgcttgcgagaattccgatacccatcgttggttccacggaagaaacggcaaggcgatatcgatcgctctgaaaagaagtttccatttttgatggatggattcgattggaaaaaaagcgattgaaactgttcgcttcgtctctcacaatatcggtttctacatgacgtattggtacaatgaagcctatattttcgttgcatgtcattaaattacgaacccggcccgttcgacatctcgaaaaggaagtatggcggtctgtggtgatcactcgaattcgatccggaggtccaggctgaatggcaatgccttgtcggtcacgctgatttcgtcgcctgtcgcaatcaattcgtccagtgacttttccaggttatgcttggtctgctcataaaattgaggaggcgcctgccagaacagtggctgtccgctcacgaacgatatcgagggctttttgatttggctatgtaatcgacgacgttagtccgggctttaaatggcaaatctcgtgcggggatcgctcacaatcgctggttctccgtgagcatctcgataaagctctccaccttggtcccctttttgaccttgagatcgaccgtctctccaccacacacagggcattccgggttcttctcatgcttgaaggtaaaggcgtagatcgaatcgttaccaacgtactgtgacgatcgccgttcttttagcgcgcgcgcgcgggagtgactttggctgaaatgtgagcgggtgacggaccatggtatagttgtcgagattaggtgccgatgtcgtcgccatcttgaaggcctcgttacaacacgccgctgacaaagttcgacgatcagccggggttccgaatctcagcaatgtcgatgttgactcacccgcaatgatcgcgttggtgctggcgatcgccgggatgatgttcttgacgactccttgcgtcaggctccaagtcaccccttcaatcccgtactgcttggaacgatctgctgccttttggtacaaccattcgatgtggtccgggtcgtcattatcgagctttttgtctgtcgttgatgcagaccacggtcaggccgagcacgatgagctgtgatcgcgatgggaggacctacctttgaacgccttgggccactcgaggacacttgcccattcgatgcagtgttcaggcagtcgaggcgtatttgcgatggtacagatggggaacaccgtaggcggagtcaacatgtccatctagagcggagaaccccgatactgtcagtaaatgtctcacttggtaggcttgaagagctttgacttgcggaacattcgtagcaagccgatattgtgggcaggatcaccctcgcctgtcccttgaaacctttcagatgtctccctccacgatcagctggctcgacttggcgacaagtaacacgacaaattcaccttctgtacccccatcgatcaagggtttcaagctctctgggtcctcgtcgtccaccatcccaaccaaggtcgcattgatccatcttcgagcttcgaccgagtcgagtccggtgatgatcaggttgaatgacttgtaaaaggcttcgtcgtggtcctgaattttgccgtaatatctggtgggcgcaagggatgcaaagtcatagcagaattgttcagagttcgacacatcagttttcagccgatccgatcgtctggacggacgactcacggcgtgaccttgacccctgggactcgcttcatcacaaactcggcagctacaatggctttcgccttgcccacgtctgcttcgctgcgagttcgtgcgctcgtccaaatcgagcgggagcggccggtcgaaaaagagtaacgaaatccaggagaaggagagtaagaaatccgtagaagcgcgaggcaggcgatgatgatcggatcaacgaaccccaaggaaagaaaaggaagatcatccaggtcagctccaagatcttgccgcggaaagactagaggcgacgctggcgagactcaccggaacaagaactgtcggttcaggttggagatatcgatcgtgtccatatcaatgacatgaatgtccctgaaccccactgatatcgattcggtgacagggcgtttgaaagggggggtaatgtcgtgtttgcgagatgtttccgaagggattccagggtaggagacggttcggtgagcagggaggcgggtagtgttaacgcgattcagaagatcaaggatgagaaccgtcagcacgatcggatcaccccaaatcaccgaagcccaggagcaaggcacagtcaaagcccccgagggcgaattccgacctttctcgtcgcacggctatcgacccatgttccggtcctgcccatacttcccgctcgtctgcgtcatgatatcgcccgtcccgcacgttggtgaggcactgcaccgaatcctctctagcggacaccacctctaacgccgctcatccatccgtctgccccgggctgttctttccgattccgattcgcacatctctcgctctaacgggcatatcctccgtccaccgtcctccgtcctccgtcctcctcccagtattcgagacccggtgggatgaacaccgaccacaccgaatcctcccgctagtttttcccgcggggtcgatctctagccggaagccgatcccgagggtcccatccttcgccttttcgcctccacccaggcttccatgaatcccaaaattgggagaattggtcctctccagcctggcatgcaccccgcggtgagtaccgacagcgtcgtccacggacactagcctggacctccggcatcaccatcaagttgggcgggcgacgagagcgacctcgacctcgacctcgatctcgatctcgatgacaagcccaaacctaaatccaaacccaaactcgaacccaatccaaactcgatcgagactcactcaacgccaaattctgtaaaatctcacatcctagtcctccggcaccgatgacgaggatcttacaagcttgacgtaggaattgcttggtctaccccgggtcggcatcgtcgtcgtcggcgtcgtcgtgagcggccaagcgtcgcgggcggccaagcgtcgcgggcggccaagcgtcaattatcagtcggtcgcggtagtggtagtggtagtggtggtggtggtcggcggatagtggattcagttgaaagtccgatcgagacgcatcgaatcgaatcgaatcccgatcgtcgcacgtccagtccaatccaatccgagcatcgtccatacgcccagcccagtccagtccagtccagccggggttcaagagaaccaaagtcgaaagtcgatgggggaaaaggatatgatcagatcgacgcgaggtcgaccgggttaggttagggtgatcgatcgtccccacaggaaagaggagaggaagtgtcagcggggaagaagaccgggttggtgtgggtgggttgatgggggtattgggcgaggttcggagtggaggtagtgccgaatagaatagtatagaggagcgggtttgaggtcgaggtcgaggtcgggcgtcgggcgtgggtttaggaattggatgagaattggaaggatgatacgccgtgcgatttcaatccattccgcgcgaggtcaggtcaggtcatgtccggtcgtccgggtggagtaaaaagaagtccgaggcagagataaggatgagaacggcaagaagtcaaagtcgagatcagcctgcgtgtcggtcaaggatgaagtgacgaggatggggatgtagacgaagatgagatggtccgtccccaggcgagaaaggcgggtgattcgtcatcccccttcctacccccttgtcgatatatccatcctatcgacacgccaacacggctcttcccgacgacgacgattccgacgacgatgacaacattaaggattcccgactcacctcttccccgcctacaaacgcctcgtctgtcctccctcctctcctatcgagaacccgatctatcgcggcatacttgacgaggtccggcgtggacaggtaagattgacgtgattgttcttgtgccggggtcaacggggtgtgttgcgagttgtggcgatgtaggatgggcggtgcgatggcggtcatctttgagtggtctgttcgatgatgtcggttgtgagtgtgagggagtgagggagtggatgtctcgacgacaacgatgatgatgatgatgatatcgagcagtatgtgggtgagtgtcgctagggggtgttcagggtggtaataacaaggtttccgcaaaccatttccacctagatgacgtaactctgcgtgcgatatatccacctagataacgtaatgtcctcgtatttccacctgatcaaaacaagttgcccgccccgagatgatcactcaaccaaagttaggttaggacattgaccaccaacaagttagttgaacaaccaatccgacaccatcatcgtcatagaccagcgacagcggtaacacaacgtagtgacaagatagtagtacaggggatcgatcgcactagatatacacagatcccggcgaaagtctgaactggacgcacactgatattcaccacgactgagatcaccgaccatcgaccgtcaacctcgacctcgacctcgcctcccccccgcctacacctccaccgccgccgccgccgcccgccatgccaaccaaatcagatcatccaaaactcacaaactcgaagaaagatggcaagaaacctccacccccgccttgtctcatagaagatcgcgatgtaggcgtgaggtataccagggtggatgatccggccagggcgttcttgggcgaggtgagtgggggcgcgatggaggatgtcgatggtggacgtcgggcgtcaaaatggatgcggcgacatagcagggcatggggaggataggaaaagtcgaggaatggagctgatcagagtgaattctgtcttcttgctcgttttcgattctgttgcttgcactcgcggatctcgacaaacgctcatctcatcacatctcatccggtctgggtcgattcgatatacccttttcccccgcaaaactatcgatctttcttgacctcggtgacctcgacgacctcgatcttctgcaccaccatatcaacaacaacaataacaacaacctcatcatcatcaacgcatcaatatcgtcacctcatcacactcccatcttcacccacccactcgcccggcctctccgaaaacgacgtgtccccgccggattcgatcccgaactatcagggaggattcgcccgcgtctactcttacacccaactccccttctctcccccttccacctcgaactcgggcacgagcgcgaccaccctggatgagacgacgaaaggacacgtcgacaggagcgggacgagacaggccgtcaaggtcgtcccgcatgagaaattggggagtagtaagaagaggaccaaggtgagtcggaggtgttggtgtcggtgtcagggttctggtttggggtttgggtcgggaggtttgggatcgattgacatcgcgggtgcgagtgtggatggactcgcagacgggaatgaacaagagtggaaagttgggggcataagcaagggtcgaaactggtagagcaggacgacaggtgcatctgttttgatggaatggggcaagagagatggattggagagcaggctttcactcgtcgatcgatgctcgatgatcgttctagaacgataagcgcgcacatgagcgagccgaagccgggatccactcggatctcgccaaggaagcggtcaagagagtcccgccccggcatcctgcactcaggaacgtcgtcgagtcgtacgaggttaccgataatgacacacaggcgacagagacgttcaccgacaccgtgcgactgtcgcagtgaacaacctccgtctccctccccatggtcccggctgccttcatggaaaccgcctttacctgcgatgcccctcatcgatcctcttgtcggttcgcatcaagctgaccctttgcactccgcgttctgcccttctagctatattgcgagatcaagattcagtccatgatggaccaccctcatatcgtcaccctcaacaatacattccaggatgaccagaacatctacctctgcctggaagaatgtgccggaggagtgagtcacctcgcaagtcgatggcccacagcgcctcaacgagaattaatctcactcacgcgccgcgcaaccggcagaacatgatgagcctcttgaggaaacgaggcaactttaccgaacccgaagcgagggtctacatgatccagctcgtctcggccgtcatgtacatgcacgaagcgcgggtcatgcatagggatctcaagctcggcaacgtctttgtgacggacaagggggacaaggggttgtgctgcaaggtcggggatttcggattggccgcgttgttggacaaggacagtgatcgaagaaagtgagtccgggtccgtggccgacttgcgtttcgagcgtacgccggggcgcttatccgcaaaacctcgcaaaggaccatgtgtgggacgccaaactatatcgcacccgaaatcttggtcgccaagggtggacattcgtacgaggtggatatttggagcttgggagtgatcatgtgagtcgtcaacgacttggtctgcgtgtcgtcgacgctcagcccgactatcccgcacaggtacacgatgctggtaggcaagacgccattccaggaaaaatccgtcgagggcatctacgagtgagtcgtatcggaaagtcaacaccgacgacccgtaccaacctgtccggccgtgccgcgcttccagcaacatcaaggtcgtcaaatatacgtggccagcggactgcgaagtatctcacgaagcaagagacctgatcaagtccatcttgtcggtcgatccgagtgagtccatgctggtcaccgcatcccctcgctacgttgcctgacctcgacctctttggcgtcacagaactccgacccaccctgaacgaaatgttgcatcactcgtggttcacgtccggccccattcctacccgcgtatcctcctcggcacttctgctccgaccggaataccacgaaatgtctcgagaagagatcaagcacaactttacccgggtcaagcgcaaggccggcgtcggcgccaacctgccccttagagtacccaaagccgagacgatggagacggcgcaagagatcggaagagaggtcgaacgagccgtcaagcagcaagaagccgagtaccagacggccattcaaccaggtagtccgatttctgcattgctcaggtgggtccgggtcctgttcgtgcgctgcgattttctgacccattcattgtatgccaatttgctgctagatccgcacgaaagcctcctgtcgtcgctccggttcaaatgtcgaggagtggacgtggcgactcgaacctcttgccgaaattccaagccctgcaaaagcaagtcccccgcggtagccccttgcgaaatgaagcaggtcgggcgctcgcttcgcaatcgacaaaattatccggcgacatcaaagaggaagacgaggatgagcaggatcgacgacggggagacaagcgcaacgtgcttttgccttcgaataatggccgagcgaatggaggcgaggtcagacaagcgccacgacccgaaggtgatcgcaaagatgccagcaagaccgcttcgaaccgagccacaccgtacgaccaggtcgcgtcgaatctcagcgcggcaatcaagttcagggagactggcgagcgcgtgcgaacaccaggtaagcagagtcgcttcttgtccgttgtcgactgctcgagctcatcgtcctcgctattctcaggaacggcgcctgttaggccacgtgatttcatcgcatgctggttggattacgctcacaagtatggaatgggatacgccctcacggatggatcggttggagttcaattcaatgacgatactaccatggtcctggctcccaacaaaacgtgcgtccagcccgcttgggtgatgcttgttgtagaccgatgtactgatctcgtgattctttccccaaacagccacatcgatcacatccgaccccgaagcaaagacgattttgacacgccacgagactcgctccgtgccgatgtcgaaccctctgacaagaagctccgagatcgcaagttcctgctgaaccactttgaagcttacatggagggcaagctgcacgccggggaaaagtattgcgaaaaggataccaccttgaacactggaatgtcgtatctcgcgcagtactggcgaatgaaacagttgatcgtgttccgcatcagcagcggagtgcttcaggtgagctcgctcgaatgtcggagctatacttgtccgtcgctgaacgactgcgtcacttcttgtcagctcaactatcacgatcactccaagctcatcctatcggacgaaggtcttacaatcacctacattgacaacgcatacagcatctggacatggcatctcgctagcttgatccaatacgaaacaagcagcgaggaaggtagccgggaaaggcgacgtatggaaagcgcatggaggaaattgacttatgctcggtaagcagccggcggcgtcatcgagcggcccatcgtttagggctgacaccgtcatcaatcgtttacagagatgtcgttgccaaactcgaccgcttgccttctgtcccggagtctaatgcagcagcatgattacgcacggtcgacaccttggcgtcctttgtatcagtatagtgatctagccctctcgagatcataccgcataatatccatctatctggcgagcggctctggacggtttcaatgatgtatatgtacgacatccccatccacgccacggttctctccataacccagaatgaacatgtttcggccggtcttcccgtcgagcaagattcagcgcaagacagattgtccgaagtacttcctctagaacgggtgacctgtcgcctttatttaggatggtgcgatggcccgagcatgcttggcttaagatatggcggatcgagttccgccttattggacaagacgccagtgacctccgtttgatggcatggcgtatcgaacggacgcctgcgacaaaacccgcctttgtgtcaaccgccttgctcttgttgtcgcgtgcaggatgaacaagatggatgcactcgcaatgcatgctgacgtcgccggggctctacgagtcgggtgatcagatcatcgatcgatccgacagggtacgcacgcgcgctgtcgccagtggtgaagcgggggaatgcccgaatgccaagcacaaagatcgtcgacgtcggtacacgcccgtttcatccgtcgtctgtcacactattcagagtccatcagctttgactgctctgccacccgtggtacacgccggagcgaaacccgcgaacgagaccacactctagctgaaatccatcgactgacgatccagagcaaagtgttcggaggctcgtggcaataggaggccgcgagtcctattcgctaagctccgtaccgggatcgatgggcccagactagagtctatttgaatgccgtgtccacccgtgcatccggcatgaggccacttgcccttgcgggccaagcggtccctactcccttctacgcgaccagcagtcagtcccactgtgcgcgtcgatgggagagggcaaggaaccggaagtgaccacgccgttaagcgtcctcgaccgggttcctcattcacatggacgtgaatcttgcggcgcgactctatccagacccgaagtccgtatattgtcgattaccgcgtcgcatcccaagcgaggacgcgaggtattgtttcaggaggcggtccgcaccagcgacaatcccagtgtcatcaccgaatagttaccaccggcacgaaccaccttgctgcctccccaggcagtcgagtattgtatgaagcagcatcatgccgtgcagtcactgcggtttacgcagcgacgtatgaatgtcgttctgcccctcacgggcggggttttcgagtttagtttccacacaacctggtacgtgtgagattgctctccacacgggcaccatagctttggctatgagaacctaggtttgtgctgacgctcctccgagtatatgtgggtttgtgcgccgtgtcttgtagggtttcctgaaccccacagccggtcggcaaggctgtcccaaagccgccgcagtcctgggcagtcgtgagactcgcccaggattaagcaaaccctctgcacggcgcaaagggggtttgtggaatggacgaatgatcgtccgggagggagggagggaggaagggggaaaccggacgatatggaagaaaaggaagggtggtgccaaagcagatcaaagctaatggactcacgcggagagatttgttgatcgccttcgcatacttgtcggttactggcgttcttcacgcgagacctaagtgggaaaaggtgggtccgtcagcatcctctttcgcacctccacgacgatcccgatcccggtccccccgatcaaaagaacagccgagcccgttgcaagctctccaaagaggcgcgaaaagcaggccagaaccgcgttgcccaaaacatacaacgcaatcgagatcgaagatggtcggcgagggagaatgacgtgacgcaaatcttccgaaacacagccatacacgaacgaacgcgccaatgacgaatcgaacgacgagcaaaggtttggggactgcggactgcgaatgccacaacctggtcgatttccgaatgctgagctggagcctgaaatagcgggagtagcgtaacgatgaacgagtggtcgggtttcgataaccgggcctttccagtctgaagccgaagcgatgagccgttcgtccagtcgacgatgcgcggtcgcgagacctcgagccggatcgcatgggcctgccaagctgtgaccctcaaatcggttgaccggattcaggccgctgcgaagagtaatgttgtcttgtggggtcgtggtcgcttgtgaagccggactgtaagcgaagagaagcagtcccaagatggccctgtcgctttggtataagtgtagtcggggtcgataacctggtcacagacgtgattgtggacgggagacttgttcaagctcgcaaggcaggaacggtggcggtcgtgaagtttctggctgtagtttctgtcggtaccgtggaggaccatggagacgaggcggttcaaagtctgcacaagggcggaggtgttgaaaagtgcaggacagtaaagtgtgctgtagagtcgtgtgcgatgaaaggccgaatcgatgaatccgagagaagttgcggtgcgatacggtggagcagtcgtgaacccgacggcggagtggtcgtgatagcattcaagccctgagttcgaggtcgtaatcagagccgagagtcccaaatcgtgaagtttggacgtgaacgacgattcaggcatcgccgagaccgtcggttcgagcgagacgcgtgggtgaggagagaaagagacggttatccttattccttagtagtttccttaatccttaatgggacgctgaataaattcccttatcgattcctgaattgctccttagtggttccttcatgacctggtgatgcttcgattcatgtccttgacgagagtctcagagtcatcctcgaaatgatatgcctgagctgaagtcctgatctcttgcaagcgccgtgtcgtcgttcacagctttctctcaaaggcctcccggaaacgacagacgaaaccagacgaaaccagaccagcaagacaaggcgggacgagagagaacccggactgggcgagctcaggtccccgaaatcctgtcagacgcgcacgccagctgcgacggccggtcgaaaccccaagcgtggtctcgagcctggcgggagagcgagcgagcgaacggacgaatcgaaccgaaccgaaccgaatatgcagtccggaacttgcttggactcgaagcgaagcggacggatcgcaagaaccgggaaggctcgtttgtacctcttcgaggtgggcaagaacggggatcggggaggagcgggaagaggatactgacggacccaccttgtttctgcaagtccgctattggggcatgttccaggttccttgttcataaatgagttccatgctcatgagagttctggtgatggcatgggtctggggggcaaaagaacctggttgatcagacgtgatggcgaggtggcgaagagcgaaagggatcacgttcgagacgtacgtgctggttgtcgcgaaagaggaaaattcctgtcaatcgggctttggccaactgataggcagtacgagtggttggtggagcatgacgagtggcggttgtgaatgtcgttgtgagtagttagagtagttgtatggcatgtatggttgatgtctgatgatgatgatgtcttgatttgatcagatgattcgacgtacgtgcgtgtgggggcaaacaaagtgattcgaccgatgaacccgatatgaaaacgcataaacctatgtcgagcgaaatcaaatattcactatcacaagcacatagaatgacgtaatatcacggtgttatgcgttttgacgacttgtctatcaatcgatcgatcgtcatctcctaatcctcctacaaattacacacaaacaaccgaaaaagttacattacgatacgaccccacacccacacctcacctgattcgcaccgcagtccaggaacagacatctcccagtcatgtctaaacgcctgaataagcgacaacaacgggaagccgatgagctcgctgaactacaacgagctcaagcttcagtccgacccgaggtacaggaggtcgatgacgacgaggaacaagagcaggactcggtcggagaagaatccgaagtcgagcacgatgaagatagtgaggaagaacaggatgcggtcgttcaacccggagcaaaggttttgaacccgtttgccgcggtaagtctagggtgatcggcaagtgaacttgattcccggtattgacgcatcctcgttcttgccctgcctagctgaacgcggatgacgaaggggagcaggatgaagaggaaggcctggatgaggagcaagatgtggaacttgaagaagcggtagagcaaccggtggtaacaaaggtcagcagcacgacgtcggcgtgtcccgtcttatgcccgaaccaaaactgatatacccggtcgccttctcttcgtctcttccccattacaaaaacctcggaaattacacggtatcaacatctttatcgacgtctatatacctggtttcttactcggcataaccgacccctgaactccggtccgtttcacctcgaacgatcaaccccgcactcgtcctccaccgccagtcctccaaaaagaagaagaagaagaaatccaaacctaccccagtatcaaccgacccaccgagccacacagccctcccgctttcttctaataacacacccggggatggtacaccatcgaacatggggtcgggagggaagaataagaagaagaagaagaagggcaatgccggcgtcgacgccgaaggtgatgggcaagggttggatgagattgatctggcgcttaggtcgttaggtctcgagtcagtgtccttccccccccttccactccgaatcgagtcgatttgatacccatcgtgaatgcagagggaccaagctgatacgttttcggtgtttgcttaccatgcctgtccaccccactcgtcgtcggtcgcatcatagttcaaaggatgagccagccaagatcggtgaggggagtacgggtaggagacggccggcaaacgaggagagcgtaaagcgcaagtgagcttcgattcgcgcgacaatgatgcagcgacggtacacaagctgatggtccccggtatcgatccgctcgatggtggatataggaacttgctggcggtggataccaagagcttggattcagaggccgagctgaaacgattttttggagcaaaagtcgtacgtcccccgcgttgcaacagactcacggttcgattccctatcgtcttgaccgagactcatcgataaaacatttgtcatccgaccgtcgctctcaggtcgcctcggctcaacaaggccaatcgacgaaacaatctcgtcaacagaaactctttcagaattacatctccaagatccggaccgtcctcgtccctcatccgaaatccacctggcccatccagtcgggctttggcgggctgagcatgcggcagttggatttggaagaggtgctcgagatgatgaggcgaagagaagccggggggaagggaatgggaatgagcgtaggcaagctcgagggcgaaagatggttcacgtttgaacacgatgccggctggaggcaggtgcatacccagttcttgggcgccgtcagaagtcacggtgggtccacgtcgaaggtctcgtgtggtctgtatggcggtcgttctaacggaatgtggggtttcctagatcccaaccaattgcaggctttgttgtcggtttacaactggcaaatcgacacattgctacaaatgtccgccatctataaccagcaaggaggtgagggtctttgtccgggatgatatctgtcgttccagccgagctcactgacccgcttgctctcgtatcgcccgacagatatcggagccgcagcagactattgcgagcgcacattgtttgcctacgatcgttgtcttgcaccagggttcgccatgaatgggacttgtcgtttggactttgatcgggtggaaaaccgaccaatgttcctcgcgctccatcggctggtctcgtgagcgacagcgtggtcggccagaaaaagttcgggggctgaccgatcttgtttttggtgatctgcaggcatctggcccgaagaggtttatggcagacagccttttcatacgccaaggcgctcctctcccttgacccggaggtgagcatgtttgacgcattgcatatgcacaattcgggctaaagtgcatcgtcgtcccgtctccagaacgacccccatggagcattcctgtggctcgacttcctggccatcaagtctggcaacctagactgggtgcaagaggtcggctcgtctttcgatgtagaacaccttccgggtatcaacttgaaccgcgcgctcgcactgaggatgcaagaaaagggcgatgagcacgacgcttcggacgccttgttgcgagaggccatcgtctcgttcccccaggtcgtagccgttctggccgacaaggccggtatcaacatctcgagctctgcccggactcatcctcatttccagatgcgggttggctacaggtaagctccattaagggagatccactggcaccagtttatactgacccgttccccatgccccttacagcgaggaccgtgacacgccaatgcacctcctcgcacacatctacgccgcgagaaacaacccgctctggaaagattcgaccatcggcaactggttctcaaagcagctcgattgcgtcgtcaaggacatcgagtcgggcaggcataccttgtcgaaatcgaccatacccgcttcgtggacaagggaggtcggcggtatgcccctgtggctcgtccggcatgctttcctcagcgagagctatatgggctggatcccaccacccatcgccgccaagcttggacacgcgtacgaccctctccccccgactacaagcatcacgtcctacgacaacgcctattatgccggcgtacgagcgtcatcgcggacctcggccgccgatccgaacctggacaactatctcgacaggctgatggggttgttccaggcgcgaatgccaggtgtagacattcgacatacgcgacgcgttctgcaagagaggatgaccgacttgatccactccgaggcgttccagatggccggggctgatagcgaccttcgtcagacgctgctgcaggaggtgagtcgcgaggaggtgatgggcacaacgataaccgtgctgactagactgctttcttacgctcatagacgatcctggaggtgatgatcgagctcggagaagatatgagtgaggaggagggtgaatggcaagatcatgacgacgacgaaatcgacgacggacgggtccaggcggagatgccgggtgcattcccgcagtaagaatgataactactgtattactaagaaggattgttgcgctatgaccctctcgataacatagttgaacgcggccgggcagctgtacagactgaataagggggtttcggcagtcgcttcctagcttcacgaacgcacggggaagttccgattctgagtgcagtgctcaccctggccagtgcaacgactctacgtaagacaagctgggactggctcggtgcaaaacacaatgcaccttgagccagaccccgcgtctacccagatgcctgcttggctttggcctccttcagggctttttagcgactacgctctgctgccttgtgcttcagcatcttctgcggtctatgagggtctcttgcgaatgtgctgtcgaacgggttcagatggaacgaatctgacctatccgggtatctatttgagaacgctcttgcgaagtagttcgaatcgatcgcccgctgtaaggggagcggatgtgcggttcgtctgactaagtatcaacgtgaaaagacagattggttgggaaggagtcaaaataccacgattcgcctttgaaaccccaacctggcgcgacgtgaaacctagattgcgcggaacgatcgagtgaaaccgaatacaactatcgcgctggacccggcagtagtcgaccgatagcttgacagccgacgtccatagctttaattgcccgtcaatcgatacttcgctcgctctgatatttctgttcataagggcaaatgctcacactagaaatgatattgccaacgctcgatggaagtgtcgtgtggtcacggccttatgcagtcgaatttcttgaggcggggtacgggctttacccagaacagtctttatctgatacagccaaactgacaccctgtttactcggtatcgtcctcacacaatacatacatggcaccatacgacaacattcgacgtcgatatcactatgaatcgcttaatacctacctatcaggccgccgctccttcaatcgtgccatgaagtgagatccttctccacagccgcctctacggcctcgtcgatcgaggtagacccttccatcaagtcccatacttgaccataagaacccttgttctgcatgacggccaggatgacttctccgactgtctccctcggctatccatcgcgcgtgcctcggggtgtcagtccccagccacacattcaggggaaaggaaaccgtaggaacggcgagactcaccacccggcccagttgaggtctccctaattcgcacttgccatccgtcccctcgtcggtcaacccaccgggacggatgatggtgaacctcaacgacttgcgggcgtacaggtccaggtcggccaggcgtttgtacttcatatctgcaccagcatcgaggcgagggaatcagttgggcgtcggtcgaggagatgagagaagggggaaggatgacgggacggacaggtagggatcgcttgatacatcttgtcgctcaggttacctgtcgtcgaatacgtcaactctggcacccttgtgaacgcggctaccagcgtggcgacgtgagatggtgcttacgagacgcttcgttgtagtactctggatatcctttcgaggtatctggacacggcgtctgggaggtcaggacgagcacgaggatgcgtgtggtcggtttaacttgcctcgaaggtcggcagcggagaccatgaccaaccggtgtacgttggcgctctccatggcgtcaaacacctttaatgcgcctacaatcacactcggacaagatccccattcctaccattcagccatggtacacaggaggacggctcgggtgttcaccaccgtagactcaccttcgtgatccacagccttggtccgatcttcccctcccttcccaccagacccggcactgaaaaccaccccgtccggtttctcggaatccaggagctgaatgatctcctgcaccgaagcgtcctccaaggagaggagatggggttgagcaccgacggatttgatctcgtcgtcgctaatgtcgccggcatggtcggtaccgatcagtatgaggaacgagctcggctaatcggcggcgaccaaaccggagggtacactgactgggaatcattcctgactacggcgataacactgtgaccctgtttgacagccgaagatgcgaatttgagagctacctgaattgtccgcaagtaagagactgatctttcatcagctagagttccgcgtcaggagtaatctggtctggtccaggtcgcttgccttgccgccaccaccgaatacgaggaattttgacatggtatgatcgtactagttcttgttcaagcaattcagatggtgagaggtatatgcagcactatagctgtcctgtgtctagtcaggattgccctgatatagacaaacttgaggtcgatggatcgacaggcgggcgatttcgatttgaacacgtcatcacgggacaaggtcgagtagaaaatggacaaaccatccacgaacgacatggtccatggatcatcttcatcatctcaggagcctgatacccgccactgcatgtcatgttcatctgtcccctgatctgtaatacaatcgtgtatgcaaaacccatgtcctaacctcaccggagcgagtaaccctgaacctgcattcccttcaagacggccacgaacctcaaccttgtttgattcccgaatgtgaagacgccaacaatttgttgaacgcctagacgacatcgaaggatcacggatcgggtcaggaacacggatcgtgatgagtccatacgacgatactcacctcgtcccggttggctacgaaagggaacgtgaatttctagcgaaagaaagagaagagtcgccggtagggcgatcgtcacattcagcaacgccgtacccgtgaaacgagtgtcaatcccatccgactcaccccggcagacaacgtctcgatctccagcccggacgagatcgtcacccccaaggtcgatttctggatcttgcccagcccagagacctcgctcatagggatcctcacttctttcccatcgacgatcactttgtcgtcgtcctgcatgtcctgcatcgtgccgctcgaaaccgggttggagagggcggaagggtcgatgtcgagtgggattccgtccatcgctgtcgtcgtcgtcggcgcaacgtccttgctcttgtcctttttcttgccagagatgaacggggcaaagcggagcccagtcgatgagatgaacagcgtcccggaattgccattatgatgagcgagataggctacaagaaaacccgtccgacagagcatcagcgggacttgttcgacctcactggcgcgaggcccaaagtctagcccgagatgcttactgatactatccgtggtataggcggtatcgcggctcttggtgcggagtaagatcccgcctccgatccctcccaaagacaaccgtttggccgcgacaacgtccgtggggacctatatgacgacggtcaacgagatgcagacgcccacatgacggccaccacgactcacggcgtcccagtccttttcgttcctcagaaaagacaaatccaacgacctctcgccctgcatgtactgtctccccgtttccagccacttgtgacccttgctcaggctgcccatctcctgctcgttgacgtcggtccatcgaccggtcgattcctgctgaacctcggagatgaccgaactcgtctcctctgtcacggcgatgctgttcccgcgagagtgggtgggggcctttgcaggtttcgccggttttggcttttcggcttctttccacaccttgccttccagaccgtacttgtggatcagatccagagcgtctacagcaggaagctaggcgtcagcacttgttcctcgagtggtctacggggtggtgactcacgctcggcgtctgtcggtgcgtcgcccatcatccagctgtaaatttgcacgtccgccttgtcagccacagcgaaaggaacaagatcatcgccttgtagtcgtcgacgtacgccatcggatcgtaaaccgggagtcgagccactatgggaatgacaaagaacatgaccacaaagatggccagttcgatcaccttgacaaacacccaggtcggcgtcagataagtggccaccatgccgaccgccatgccctgcgaaaaagccgcgtcgtgtcagtccaacaatctcgcgctctggaggaggtcgggtcggggcactcacgatcgccgccttgaccgaagcctgaggtctcttccacgcgaacaagcttttgacgttcgatgtcagccaacctttctcccggccatgccctccacagccacacccacttcatgaccttttcgtgcatatccgccagatcgttcaacactagctggatctgcgccccgtgttcccgctgaaacgtctcccacgcgccaatcaacttgaccttgctccccgccgaagtcttgcccgccgtcgtctctagcttggctttcccctttttcttgagcttttgagcggcgtgcatcgtggcctggttgattttgtccgacacgtcccgggtcttgtcgagcaggtcgatatccgaatccgattcgctcgacgacgacgagtctgaactagagtcgtctttggtggtcgtgaagattccctttccctttttggcggtggccttgttcttcttcttgtccagcttttcttgcttggctcggtcgatctcatcctgcttcttgaccccagccaagagacgttcttgaagttgagcggcggattcgggcgagaatctgggtttgagcagggtgtacaggaggactccgatcagaaaaggcaaaaaggtcgacgtcaacatcaagatcaggtagatctatccgtgttgggaaaagatcccggtcagtattaagatcggcttgccctggacttggtgtacgcactcccatccatttgagagtccatccgatattgtcccacatgaccaccccgccgagaccgaccccgagccgttcccaaggtccagcacgggccgtcgagtagagtcgtgtcgatgcggatttgaacctcgcgatggtgaatcccggagtggacgacgtgagggtcggggtcggatggatggggatggggtggggcacgttgagcttgtacgtcagtttctggtaacaaggcaaggtcatatgagccgggaattccatagaggcgcgatccctggtcaagatgatgacaccatgctcatgcacgacttacagcgaggtagtaggcgaaccaatcgatctccttctcgtccatcggtctgacctgtacctcgtctgacccatcaccttttcgctccacccccacctgcccaccgatcgcagccgcggcttcttccctctgagcgataccttcccgctcagccagatcccgcttcttcgcttcctctatatctccatgggaatcgagcatttgcgtcgagatgggcgtcttgcgtgcaaagtccgaggggatgggcgcgatacgggctggggcaggcgaacggggtttcttggcagtaggattcagacgcaggaaatcgacgtgctgcgacgtcgggggaaatcgagtcagtcgacgcataatacagaccagcgtacttggaggagacgaagtggagtggaggatcaatcaccttgttgaaattggtcatataacgcttgatctcttcctgctcgacttgtttcctcaacaccttgacatcctcggtctcctctttcccaagctccgagaccagacgtagccacaaacccggggatagccagttcttgcgatcctcgttggtggaggcgggagcgaccgtcttgagggagatgacggatttcgaatccgcatggggtttgcttgctccggggttcgcggtcgcactcgcactgtccgggttgacgacgggagggttcaacgtcgtagggatagcattcccgtcagcatcaacgatgaatacctcgtcagaggggagtctcggcatcgtggcctgagacgtttgacgaggtggtagagggggtgcgagtttaagttcagggttgaccccagaggtgctcgttcgaggtggtaacggtgggggtcttccggtatcgctggacatcacgtcgagtaagtcgggagctcgagtcgccgtatactgagtacttgaagaggaaagaaaactgtgtgatatccaaagtatacaatgtggtagatgtcgttcgtcgtcgttgtattcggcacctgacttgacctacaacatacatcgtctcttctctacgtcatatctggatccgtcggatgcaaaaggaagaaaatgtctcggaagtgaattttggggaactatctcacggaagcatattcgtgatggtttcgtagggcatggcctcgatgaggctaccttggaggtcgtcgtaactctcggaagtgcggtctacaagctactttacaggaaggtctgagagcagggtgtaaatctggggcgcgactatctcgctcgaattgtgctcattcaagatgatttctgtttgccatcctcgtgccagatgttaggtagtcgcagtgataagagcaagttcgatagagcaggtcgcgaacaacggtgaaatcatcgatatcgatctctcagaggatgcagcttctacggtgccgttctcgataccatcccgtctgcccgcgcactgacacctacaaacgatacctcggagcagagccaggacaatcagtaatcgtctcgcatcgacttcaagcatattatttatagtcgtcatacgtccccgtccttctgaacacacaagctccccgatatttatcactcggccggggatcgagcgatgcgggtactttatcttcggatcgatgccttgttcaaccgatatgtcctcgagccctagggggaagaaatacgcgttaatccgccacccggggatgaggtgggaatggcagcggttctaacattgtgatagtcctgccacgtacgcgatgggaggaagaggatcgcggcgacgtttcctggcaaacgagaatagacaacaagacggtagtgaaacctgcaagatcacacccaggaagcgaggcggaggatgagatttacctgtatagttttatcattgtttgtcgggtggtaggcgcgtaggaacagttatgcccgtgttcaaccaggaggaagaacgtcgatcggggtcgagttcggagagacgctgctccagctctcgtactcgtaggtcccactgaccggtgtcatgttgatgctctgatctgaaggcaagtgtgtgaaaggcaggcttataaccgactcgtggtgctttgtggtactcgggtgtcgccccggttgaaaacgttggtaagcgcgcggtattccgagtctttgtatccttgtcgatttgattgccccccggtcgaattcccccacgcaaggcgaggatctctgtcgctgagacctgcttcccggcagcttgtacatgagagtacgatgtgggtatggctgggagtcgacgttgctaccctgtgtatgttgccaccctatgactatctggtggtcgctgatttgaacgcggtttaatgaaattctactcggaaaaaggagagtgacgcgacctaacaagagtaaagtcaggagttgggcaatggtcattgatacatcgtcgatctaccaacaccgacaaacatacacccgccacaggccacaagtgagaattgatacaggcacactttgatgctcagatctttaccgtcgaggaaaccgtcctccctggacgaaatcgatctagtgggggacaaaggggatcatcgacatgacgacatcaacaacaataacactactgccattacgagccaaaggagacccagctcgatgatacccccaccgacattcaaggccaagttgacaggaatgagaccaccgacaagatctcatggttcgaccagagagaaggagacgcacgacccggaggttcacccgttgaacgacctgtatcagatcatccaccaaccaccatctcccccggcccccacgtcgtcgtcgaccgcgtcgaatggggtaatcaagctggattcattcgtcctccatactatggtggacgagacggggaaatgggtcaaattccggttgtacggtatggtagaacagaagacgaagccccgacaacacggaggggacggcctgcgggtcaagaaggaggacgttcggtccggggttagcaatagcctggctcggacagtagagcgggaagaaccgagtgccaagaggaagagggtggatgttgtgaatacaaggtcgacgacgaggaccttggtcaacacgtcagcttcgtctgcggtgaaaatcgaggaaagcgggacggaggatgaggacgaggatgaggtcgaggtccagcgcgaagacgaggaccacgtcgaggtagaagacgaggacggacgttaccgggcagctcgaacgggagggaataagagaggagaagctgtggatatggagacggtggatctgggagtagggctttggaaaggttatctgaggctaagcagggtgagtcgatatcacccttccccccccctctatggctccttccctacgccctccccgtctcctccgcgttcccacaccccgtcgtgtactgataatctcgctaaccttacattccctggaccccctcacgaacggccatctcatgatcctccatccgacaaacctgttcatcctccggaacacctcgtctgacctaccctcgattccttggatcacccgacccgacccggacccgaccttgacccgaccccggtcctgacctggacgtgaatagatccaacacccacataccccgcagacgatcaagaggtccatctcgcagggttacatccacgtacaggctgtacctgcccgattacctgtcatacggacggggtccaggggattggcggatgaggcccaaggacatggagatggggatatcaaggtgagcaccccgcctccggtacaacacccggatcgacatgcaggctctccaagcaaaacgctgatgatccagaccggggttccgcccagttgatcatcgcgtacccaccgggacaagcaggttcgggttcgggacaacaaggaggagcccccccgccgcaagtgatcgggtgtcaattttccgtctcgccgctgtcgcatgagatgaggatggacggatggggtgaagaagggttgaaagggtggtgggagatgggatgcaaggtaggtaccctccaacaggactcgaacggacgcgaggtcggatgcagttgttgatgacttttggtcaatcgaccgtacacgtagatgatctcggcatacaatcgtacctatgctcaattggcggcgcacgaagagaaacggaccagaccgcttcccacggcgaccccgcccagctcgaccggacaggttcctaccctctctcaactcgctgtcggatctagtcaagagggaccgggcgggatgaccagacgcgggagcgggtcgaacagtgaaccgacgtatgaagattatctggccctggtcaaagaggtccagatgctcaaggtgagcggcgggtcgaccgcgtggcccaactttgtctgcccccgagctgacactagaggttgcgatctggggtggacaggtagagaaccggcaactggctcaggagaattccgcgctcaagggagggtacgcgggcaagttgtcattgtcgcaacagcagcaggctcgaacgagtcagccggggtcgttgcctgctagaggtcatgtcgccccggggatgagcaagattcagccgggtatacggaggtgcgtctacggggccaacgtgtgcccatgcatcgtctcgctgacacccgcatcgtccttttccagacaacccaagatcgaaacgggctttgcgtcgtcgagcgatgatgactgaaggctgggctgatattcacccctcttctacgacacgtgtgacgagtttgatacatagcgaaagagatacaagttgtatacagtcggggttcactctgctcccatataatcaagtttatgcgatgtcgtcattcgttgatcgtttgtctttctcgtcttgaagttctctccttcactcataggtcacgaggttctgtgaccacgtcgtgaccttgtgatgagccatgacctgtgtggtatcgaatcgtgagcaacatgtaccgacccacgagcaggacttgaaggacgcaccttggcggcattgaatcccgtcacctgcaaaccatcgagcgaagtcgcacgggagagggcgacataggcttggcccttttcaaacacccgtccgaggtcaaccttgacgcgatcaagcgctgcaagatcgaggtggtcagtgttcatggatccaatcggggggcattgaaaccgagcacctggacccactttgaccctgagatttatgaatactcatcgcccatgccaagattaaggggagttgtagcctcgacgcctgaatctctccattcggcagttccgtcttgaacgtgtccttttcgacaatcacgtcgcgagttccgcctgcaaagttccccacgtaagcgatgcgtgaccgagatcgtactcgtcaaccagtctacccacctccaggtatcctgaacgaaacgacggggagcttctcgccgttggccttggctgccgcggtcgtctttcgtttcttcctcggtgccccgtcctcgcccactgaatcgtcgtcggaactctcccccatcggttcgcccacccatctaccggtcgtgtcctctcggtacaggtgtctctcgcagaatccgatcactttgcccatggatccgttgacgagcgtctcgtcgacattcttgatgagcatgacctgggcgtcttttttgagaacgatatgttcggcggccatcatgttggacaagatcttgtctcgcgtatcgttgcgtgggccgggtccctgaagggtcaacgcctgtcagctcgcacgaccgcgatcttgcacccagagacgactcacatccacggcattgtacgtccatgtctcgctcctcaactgctgcaaccttgtctgattcgctcgctccacgtcttcacgtcgagggaacctgcggacgtgcggctcttcaataaaatcgtctcggacgccacgtcacccggaccgcgaccgacttacagctcggtcggttcgatcccgtcggtataaaaaatctccctcttcaaccctgcaaacctcgcgatcgacgccgaactcatcttgccaaacctcatctcgttgagcatgtcgacaaacgtctgatcgcgttgcctaaagacttttgtcaggttgacactggcagagacggtctcgttccacgtggcggcttcaaatgcaaacgtcggcgatttgttgtgtttcgtcacgggcggcaattggaaaaagtcgcccgtcaccacgatctaccggtcgtccagtcaggtcggaagagtcgctcgggtgtgaaaggagatgcgactcacctggatacccccaaacggcctatcaggttttcttcgaaggatgcctccgatcttggacaacttgtcgaacagatccccatctaccatcgagactgtctcgccggatggaacgccttgttagcccgtcgctcgccatcactcgtcggatggacgtgcttgtctaccgctcaccttcgtccatgatcaacacgttcgtcctcgtccaccgactgagtgcttttttattctttctgatattctggcaaagcttttccggcgtatccgctcccaatccgatccctggtcacgccgacgatcgcctcgctagattgtcagcctcggtcaatcccccccggattgcaaagccaaacatggggactcgcctccaaaactgtgtatggtcacgcctccgatattgcacgcggcgatccccgtactggcggtgacggcgaccgcgtcgggtttccccgcatactttttcttcaacgcccggatgatctctctcaagaggaccgatttccccgtccccgccgacccggtgaaaaagacgctccgaccttgatcgacgaccatgccgaggacgttgcgttgttcagaggagaggacgactttttgacgaatgttgagcgaggggtccgtattggcgcctcgggcagtcgtgggcgtcggtagcgagattttcgaggtggacctgcgtgcgtgagcgatgaggggggtgagcgggatggatgggtcagtgacgggcgcggtaatcgtgggcgtcttggtcttgatcttggtatttgtcggacgagggtcactcacgtcaaaccgttcggttcccaaggaaacgcactcgaccctgatcccgagggcgtgtgcgtatctcccctctgtaaagcgcgcttcgacccgactcccgtactcgtccccgtcctgctactcgtcgtcgttgaagccgaccccgacgtcaaactcgaagcgccagtcgaacccgccacggcaccgtcgatcgaaccaggaggaccgctcgtcgtcccgttcatcgccgccaacatggccgcccgtcgtcgttctttcgccagagccagttcttccggggtctttgctgtcatcgagggtcgaggtcggccgttcacgttcgcgcccggggtcgaggtagcggtcgaagttgaacctcgggatacacgcacgtcgaccgggtctggacggatgaacccgcccggtgcaggttcttcctcttcaggcaggatgaaccctcccggagcttgtccttggggtatgctctccggagtctcaacgtggacgtcagtgtgggtgtgggtgtgggtgagctcgttcgggataaagccgccttcgagttcgggaggagcgggaatagggggaatttggtcgtcccccgtccccgtcgaaaggagaggtccggcgggtgtgatcggtccgcctacgagaccgccagcttcgtccgtgttcgtggatgtaggtaccaggagattcggctcttgacctcgagctcgggtttgatcaggcagagctacgcgggctcgagggcgcggaggaggggaaggttgagagtagatttcgaatgccggggaagacgatcgagatcgtgatcgagctcgcgtcagggtggaagtggaagccgaggcaggcttcgtctcagcgatagagtgcgatcgtggttgtcctccggatgaggatcctcctggtcgggattgagaggaagaggcctgacgagcacgtccgagtccgatctgtctcggtctagtcgagcgcgattacacatcggacggccgagacacgtagggaaaaggatatcagtgacactttcgaaacgcccaacgtcaaaccggatagacggtcgaccgggctctgttctcacctctccggggatggactccacgtcaagctctcctgcgtcttgttcacctcgctcgagtgattcgcgctagagatggaggacccggtgatcaacggtcggatcccagtgctactgctcgtgctcgtcgtagcagagaggacgccgttcttggatttgctgatgttcccatgaatggcaggagtagcggagttcctggtaggctgcggggtgtcaattgaagagtcgccccatttctcggcggacccgcttcctagacgactgagtaaccttgagcccgaggaggtggtggtcgtggtggtggtcccgggtcgaggcatatttgaaacggaaacagggaggttggtgtgagttgaaggacggaatgggtaggttattggcatgatgagtgttgcattgcaagcaagaccttgtcgacgacctgacctaggacgttggggatgatatgagtaggtgtgcagtgtgtttaagtataaagttgatcgcggtttgttatggatgtcactctcagtagttggggtcgggaagtgagggagagcggacatgcgaaactttgttatgtccgtgaattcagtcctcagcgttcataaacagatgcatgtccgtctcatcggagcggtcatgtcaatatgttcatgtccgcgtctctggctagtctctctatgacgcgccctccagctgacctttttgcccttttgacgcgagtttccctcatatacctcgactcgcgacccatcaaagaaagggggagaacgatgatatcgaccaaccatatatatacatacgcccatactcggtaggaacttggtcgagggtgctcaggcaggtcccggctgccgggtgaacagagagagacggtgacggggacgagtacgacgtgatcattttcagggaaaacaggtatatatacacaagtcgattcgacgcgtaatttcaagcaaccacacccatacgcaacgcacgtccttgacccttttcgagcgagacgatgcttgaacatccgattcagagtcatctcgatcggtagtccaagtcttgtctttgttgtcctagatcctagtcgatcaccatcatcatcatcatcgcatcatctcgtcatcatcgacgtagtcaacagccgacagtcgaggataagcattccacatcgacctagcgacctgacgtctgactcctacccgcgtttaccaactagaggtcatcgtcctcgacacggacgttaatattgacgacgtcgagaggtcgggatcccactcgactttacggacgacaagtcgggatactcgtcctcctaattctagttctagttctagttttagtgcctggtcctggtcctggtcttgttgcgtgggcatacgaagcgggactatcaagcccagcctagccgagcctagttgagcgtagtcgagctgcagcaggtcgcccgaggatgacgtccaggtgagtcgggagacgtcacacgcacgtccgagtctcgaccataccatacagtagttgggagctcgttcggaagaggaagctgatccgttttactcgttcttacacgctcttcctgaattcctttgacatttcctgatcatgctccgggcactggtccttgacatcatccacctcgcctcgcctcacctcgcgtcgacgtacgggacttgcccgctccacgcagactcgaccggctcgtcgccctcctcgaatcaggttcgaccccgaccgtcagggaaaccgcggcggcacagttgggagagctcgccaagagggaattcgaacgagaattgacggatggcgagtgggattgggatcgagcgagcagggtcgaggatgaggatggcgaacaggagcggatacgaacgtcgacgccgcgagtgcatgaacaggaggtcaaaatggaggtcgaggcaaaggtgcttgtcgaggacgagatcgtcaagcaggaagatgccgtcatctcggaagagaaaccggcccaggtcggcgacgataccacctcgaccaccatcgcgatcacaccggcaggaccttacttgccgacactccgactcttggccaagatcacaccatacctcgttcaccgctcgatggacgtcagggtggccgcggtcaaggcgatcgagcgggtgatcgacggggtcgggaagtgggaagaggtggtgcgcgtcgagatccgacgtgaacagaaagatgtcgtgagcgacgtgatgacgacggacgattgggtcgacgtcgaggctttgatcagggaacagaagaaacgggccaccgcgacgaccacaatccccctcggtggcacgaaacgatcgaggtcgatggcgacgcctaccgggacatccagaatggcatccggtagcgcgtcaacgctcatcggcagaaaacgacccaaagtcgacgatcaacatgcgaacgcgctcctcgatggcctttccataccaagagacctcgtcgacgatgaagaggacgacgatcttgaccgtgacgatgacgacgagctggaagccgtcgaggtcgtcgcaccgacacctaggaaacggttgaaactggactcaccagctttaggatcgagggagggcacacccgcgtcatcctcgaaaaagatgggagcgaggctgcccaaggtgaaaaaagagggtggagttgggtcgacaccaccgccttccaccctggcatcggcagccacgacgacggacacctcggcgacgtccgtgtcaaacgttggtggagcggaaccgaccgaagaacagatcctggctggactctccagtcgacaggccctcctactcagacgcaagatcaggggcggcatgtccaaggccgaggcgatgatggagagcatgagattgcaaggaggaggcacgcccgtcgaggagactcccgcgtcggtgatcccgcccgtccccgtggactcgcaagaaaagccagccaagacgcctaagaaagccacaggcaagggcaaggaaaaggtcaaggaggaacccggcgtactggcggtcaaggtcgaggatgaagcggcgactaaacaatcgacgccgatgcccgtcgcacccgtcgtacccatcaccgcaccagggggacccatcgaagccagtcggatggccgacagtgacctcgatgacatcctgccacggacgccaaacgaatgggtctggacgcggctggtcgagaaactcgtggccatgttggagtcggaatcgtgggaggctcgacacggtgcggcgctggcgctgagggacctgatacggatacagggtggaggctttggtatcgaccgccaacgctcaccagaggacaatgagcgatctcgacatgcagcgctcggacggctggcaaaggccctcatcctcgtcttggcacgggatcgattcggagactttgtgggcgacaccgtcatggcgccagttcgtgaatcggcggcacaagcgctggccagtgtgatcggtcgaatgcccgcccgaatggtcacccgggtcgggcacaccttgttgagcatgattatgcagagttggaaggacgtcccctatgtgtgggaattacggcacgctgggctgctcgggttgaggtacatgctcgccgttgtcaaggatcaaggggtcgtcggtggagagtcgggtggagagtcgggtggactgggtttgcacgaggtactggccgccaccatgatcgggtaggtgtcttcaccgctagttcgattcgatgcgtacgactgacccctgctcgtcgatagtctggccgattctgatgacgacgtccggtccgtttcggcgacgtgcctcttgccgatcttgccgctcctggccgaatcccttggatccgacgacctcgccggtctcctggacacgctatggaactgtttctcggtcgacggtgacgatctgggaagtagcacgagtgccgtcatggacttgctttgtaggtcgggtcgaatcgccttcacgaaataggcaactgattcgtggcgccattgttaccaggtcggatcctcgggttccccaaagtcgtcaagatgtactctcgcgaaaatggaccaaggcgagtcgaccgacatgccgccggtgatatcgtgctaatgcgctacctctatctcagcccctcattgtccgccctgataccccgcctttacccttactttcgacacaccatcggccccgttcgcctcgccgtcgtccgcacgattcaagcctttttggacgatgccgacctacccgacgactggatcaatgccgacatcctgcatcttctctacaagaacctcgtcgtcgaggaccggatggactgtcgaacagagtctttggcggcatggaagacggccttgcgggtcatttcggtgcgacctgatttcttgtcaaacgacgtgctaccccacgtggctggttggctcaatatcgccttggtacccatcaacatgccgttggagggccaccttttccacgacgtcaccgcacggggatctaacaccgcacacaacgtcgacaagagtatccttggagctgacctcgcgttggtatcgcccgacactatccttcgcaatcgtatcgatgccatcatcgccctggccgaagtcacgagatatgacgtgtcggcagtgagtttggttccagccacccagtcgacccgtcgtccccttgctgaacttttgcactcggtaggccactcatcaaacgctcctaagcggatacctcacgtcgaccagcgctcatcaactgtctttgtgcggaattctcatggaagaatggacccgcgttcgagatgaagactttgtagaagacctcggcgcccgactcgaaaccacgttgccatcggtgggaccactgatcgccctattggaacgcctggtcgaagtgggacccccggccgacttgtacgaggtgcaagcttcattacaggccatccggcaggaagccaaaatgcttgccagtctgatcgatcgacattcaaaaacaccgatcgatgcgacctctatgacggagatttacgccgcggcgagcctggaacacatacaggaacttctcgagactggattcgccgcctcgatcgagaaactcccggctgccaagcagaaacaagccagagccgctatcaaagaccgatgggcaacgctagcgactgccattgcccgacatcgcgttcaacaggaacagctcgagatccagatccgggcgacggccgcggctgcactgatcggcacgcgattcgtccccgccaagatgaacccgatgatgaaggggatcatgagtggagtcaaggcgagtcgattcgatcccatggggatccgcttgcagtctgctgatggacagagactcgtttgcaggcagaggagaatgaattgctacaatcgcgggctgccaactcggtggccaagctgatcaccaactgtttgaacccggctctgggactgccggtccgacccgcactcaagctcgtcgagaacttgccaaagtttatctgcagcgacgaatctttcacgccgcaattcgagtcgctcgccgcggcgcaagggattttgacgttgagccaggcgacccagccaaagaacgatgcgcacgataccgagcgagatccacggcaggaggctcaagccttgacacgtcgaggcgcgttggctgctctggcggccgtaatcaacacgttgggtgcgactgtgttcgagcaagcacccaacttctggaacgccatggccacgcccatcttggcccagactgagcccggtaagcgccatggtcggtcgtcaagggatcctaaaaaactgatgcaaacgattatcgtagactctgccgcgggagaagacaagcagtccctcatcgatgccttgacgacgctacaggttgtgctgcctcttttgccaaatgaattgcatccccacatcgaggagctggtccctggggtcgtagcagccatcaagagctcgtacgctgtcgtcaggaacgcagccggcaagaccctggcgatagtatgccgcagtatgcctcaacaaggcatgaggatcgttctggatgagcttttgccgctgttaggggatactaggaatctcgtacatcgccagggagctatggaggccatttggggtgagtcgcctggtatcgatcgtttcgcagtcttggcgcttaccaccatgactcgtaaattgcaacagctacggtggatggcatgcaattcgacatcctgccgtatgtattgttcatgatcgtcccggtacttgggcgaatgagcgatcccgacgagtcgatgaggctgttggcgactcggacatttgccaccctggtcaagttggtacccctcgaggtgagtctatcagtgattattaccaatggttctaccagcggctaagatccttcttgtggttcaggccggcatccccgaacctcccggtgtcagtcaggacatgctcgccaaacgacaatccgagcgagactttttgtcgcaactgctggacaatcgcaaagttcagtcgtatgtggttccggtccccatcaaggccgacttgcgatcgtatcagcaagacggtatcaactggatggcgtttcttgccaagtatcagctgcatggttgcctttgcgacggtaagctcgagtctcgccttcgtcatcgtgcacgacaatgcgctcacttggttacactcgcatagacatgggtctcggcaaaagtctacaatctatctgcatcgtggccggaaaacacgaggaacgacgcgcccggttcaaaaccaccggctcgcctgacgctgctcacctgccctccctcatcatctgcccgaccaccctcatcggccactggtatcacgaaatcacgaaattcacgaacaacttacgaccctttaaatactatggctcgacagccgaacgagccggtctccgtcgacagatacagcatcacgacgtgatcattacgtcttatgaaatcatccgaagcgacatggaatctctacaacgctacaactttttatactgcatcctcgacgagggacacatgatcaagaactcgaagagcaaactcaccttggccgtcaagtcgcttcaatcggtacatcggctcatcttgtcgggaacgcccatccagaacaacgtcctcgagctttggagcttgttcgactttttaatgccaggattcttggggacggaaaaggagtttagcgatcgattctccaagccgatcctcgcaaacaaggacgccaaggctaccccgaagcaaaaagaggccggtaagttccgccagggcgtttgcggcgtctgccttttgtcgagcactgaatctcgccacccttgtccaaagctatcctcgctctggaagcgcttcacaagcaggtgttgccgtttgtcctacgacgaatgaaagaggacgtcttgcacgatttgccaccgaagatcatccaggactattattgcgatcttggacgagtccagcagagcctgtacgacgactttcaggcttccaaggctagtgatgacgcggtcaaatcgctggtgtcggaaggctccaaggcagatgtcgacatggacaccgctgccgtggcaccagcccagaagcacatcttccaaacgttgcaatacctgcgcaagctgtgcaaccacccgatgttggccatcgggacggatatggagcgatacaacgaggtcgtccgtcgggttgctgcgggtgacaaggatgtcagcaaggatccgatggacatttcgcattctccgaagttgctcgcattgcagtgagtcatggatcatggcaagcagagagctgaggcttcgacgctgatgacgattcgggtactctaggcaactgctacgtgactgtgggatcggcgagatcaaggctgaacctggggaagctgagctcctgggttcgacgtctcaacaccgggtcttgatcttttgtcagactcgacagatgctcgacgtcatccaaaatcaactctttgtcccgcacatgccgagcgtctcgttcatgcgactggacggcgggacggaaccgatgaaacgtcatgacatcgttcagacgttcaatgccgaccctagtatcgacatcttgctcctcacgaccagcgtcggcggtctaggactcacgttgacgggcgcggacacggtcatctttgtcgatcacgattggaacccttccaaggacatgcaggcgatggaccgggcacacaggctcggacagaaaaaggtcgtcaacgtgtatcgattgatcacgaggggtacgctagaggagaagatcatgaggtgaggacgggttgcgtgtttcgctggtgtgtcggtcgtccagggagttgatcgccttgcgcttcgacagcctccagcgattcaagcagaacatggccaatacggtcatttcgcaacagaatcagggtcttgataccatgaatacggatcaggtactcgacctgttctctgcgccggccgcgggggcatcgacgggcagcaagccagcaagggatggtccgatgagcaggaacgacattttggccgggtgagtggagcgagatgtatggcactgccaagtacatgggtcggagaaactgacaaggcgctgtttcgctgccctacttttagcctgggagacttgtcagccgagcaagagtacgacgatttgacgctcgatgcgttcatgtccaagtattagacgggagccgccgaggtcgcccagttgaccggaattttgccttttcgctgaaagatcgtttgtgaatgtgttgatagggttcgtatctttgtaccagaggatatattgcattgaacatggatatgtaaagctatatagcatctagcatggttatgagattcggtttggaacgttaatatgtggagtcgaggatcgagtgagctcgagtgaaacatccggtcgcgaccgagacagctcggtacttcgctttcctacttttggactatatccccttccccttgcatgtcttttcaccattgaatccctcgacagctattccacaacgagtttgaccatctcaaagatcgttcggcctcaatctacaatgccatcatcacatcgatcccatactacgaccctcagcgtcgtcctcctggcgttgctcctcttgacgcaaacggtggccgcccagttcgaaggcatgttcaacaacatgttcggtcaacagcaacagcgtggaggtggtggacatcatcagcatgatcaggggtcggctcatggggtaagaggttgggatctacagaacgcgggtgagtcggcttgggtatcaagtagtaggagtgttgaagtagcgtgaagatgaaccagagctgatccggaggcgaggattcggtagcttcttgctggaacggtcacgtctgttcgggtaccgccaattgtgtcgtctcccccaaagattgcccttgtccctacccgtaagcaatcgtcgtgagctcgatcgcaacatggactacctagtcgggctgacatcgaccccggttctcgactctcctgtcgtcgtcgtcgtcgtcgtcgacctccacagagaggattacaagtgtttcctccccgatccgcctcgatcgatcatgtccaagctccacatcgggacggcgagtaaatcgagcaatacggagagtttcgtttgtattagagcgagggaggggaggacggtagagagggagtgtgagcgggtgaggaggttgggtggagctatctgagacttgaccctcagggggtgaggaagaccggttgtgcgtatacggacggatgcgtctagccgataaattcatgataaggcgtttgggatggtttcgaagacggtgggcatccaacgaggatgagacctggccaaccgcaaagcatcaccggtcgggcgagagtcgtaaagcagggtacaagatcatcgatgtcagactcttgtaccgagacggtcgagactcgaaagagcgtgagggcagggacaaaatatggggagcggtcaaccgacaccgtgtagaagaggcatcaagattgtttgaagggccggtctttggtcatcggctggtccatgtctccaggtcgagccgagacccgatcattggcaggaacgaggtaaagcaacggacgcttctaaccttgtcaagtatagcgagatcgtggatcgcattcgaccctaatctgagcagagaggcagatcatggaccgggtcatgtcacaccgcacatccaaaagtccgagggttatatctgtatatctagcaaatcgactcttgccctgatcatcttctatcttgttacaagacttgattcgtctcacttgtccagccccgcctctgtaacattctcgccagtcgactatcgacttttcctgagatcctggacgccgatagcgcattcggcacaggacgtgaaatgggttccaggcgtctagctaagggaagcgacgaattcctactcggtcccagttgatcgacaccaagagagaagcaaagagtcagtactaggtcgtcagggtactgcgagtgtcgaagcgggacctgtgggcatgactcgccttttcgagcttgccgacaacgttcttgaagctgtctacttgcttgtaacagtctagcggctgggtcgggttgttcctatcaagacgagcggaagacggagcgaagagtgagcacccgatggcaagacgcaacaaccatgtcctcgacgacttacaggtaacactgaacgagggacgctcggccggtctccacctctgacgattcggcaccgacgtgtccagcccgtttacccatcatcctctcgaccttttcacgcacgtcttccaggtcccggctgagcgtcaccgagttcagactaccttgcgagttttcggtcgatccgcggtcacggtcgaggttctccttttcgagcgcagaggagatggatttgaggatctgggcttcttcggaacggagcttggagacttcggcttggagacgcgagaggatcacggggtcgtggtggttcgacgacgaggacgcgttggtctgatccgaggaagaagaggtgagttgggtgagaagagaaggtgcgaactgtgatgacgacaagactgtcagtcatgcatgatgagattgagggtccagcgatcgacgacattcgactgacctggaccgaggtcgatggttcttgaggccggatgacctgttcgatgggagcgacggtggatgtggattgagagttgcccatggtgacgagttggcgaggtctgtgagagcggctgattaagacaagatatcggtagagttggttcctatctagatactaatgacatgatcggacatggcttgaccctttcccaagtcactttgggtcgaggtcggtcgaggtcgaatttgctgacaaatcaagaaaatgagaatggtaacaaggaaaaagttcggatccgagaaatcgaacaaaacttggtcgctgaaacggcagacaatcgtcgacccttcccaatcgcatcagtagccatgtcattgccacggatagaccatccagctggtcaagtttctgtgaatgcgtcgatcgatgtcgtgaaacaatcgtcggcatatgcatgctacgcacgacgctctcgacctcggtcggccgattcgattacgttgacctcgtacaacaaaaatatcgatcgtctcgtcccttccatttattgttcggtgatagtgtcgcgtgtccccttgttttgtattctcggtgttgatgccaccttactcgtacagtcgagtcaccgggccgcgattgcggatgtgcttgcgccagatatctcgtctgacagtccgctcgacacccgctcttctaacacctttgaagggtacaagagtctagtcagtccagccactctattctgaacggggcgagccgtagcaattttcctttttttcgatctaaatgttggcctcgcagcctgctcgccacgaccgcagtttcaccgtcaaagcacaagagggactgaagagcaagaggggtgtcggatagtctttctagccgatccggtgttgatactgaaacaagcatggatagatgacgtcaaactcggaacggaacggttaaactcacagcctatgacatcacaaagtattgcccatcaccgtcgaactctcgtacttgaggtcaacggtcaatgctacctggttaggacctgcccgtacgatccagtgtattcagacaaaagcttgtcgatgaccccgaagcggataaagtggcgcgattgatcaaggagatggaaaaagctgctcttacacgatgttatcatcgggataggtagaaaggaaatacgtgttgatgactgatctgcgccggtctggcttcggatatcgtcgatcgtctcacagtcgtcgtcatcatcttcaccgcgacttcaaggccttttcatgccaaagtgacggccatgcggagttttgatcatttggccacaatcaatgccggtcaatttcaccccagttgcaaggaaatcgtcaatctgctgacatctctcgagacttcctggagccccctcggcgaggatacccagagcgatcattgctaactctttcttgattgctatacttttttagctgcgcgtgattgccagggagacgaagtggaaaggtacctagatagcttttagacagtttttgattgtggtcgccatagctccaggagatcccggcagcgctacgattcgtaccgaagaatgggcaagggttctaacctgacaatgaccacgtagatcgatacgatccctcgcacctgattcgcgcggcttccgtcatggcacaaaaacctgagggggatactataccggagaaaaggcacacttgacgtgaggcttctcatcaacttcgactcgtcttcggtgggcctcagcacgagactcccaacgtaccggcgcgccttcgatcgtcaacgaacgtatgcgcgacgtgggtcactcccctcgcagatacaccgcgatgacgctcgacacacggccctcatcacatcattatgacttgtgactactttcttgagcgcaagtatatcgattcgcaagctgcttcgttcgatacctgaaacctgtatatccatttatcggtgagacctgtttgggacgacttttgagtttcaagttttggctggaacaaggtcacgtgacaaatttaaaagttgggaaatcccaacccctcagggtcgacttcaaggatatgctaaagtattcattcgatcgataattcatcgttaccatcaccttgcactccaacaatacacacgagctatagcagagatagagctttgtctagcaatggtccaggaaacgccgacaacgccggcagcgatgaccacggcactccatcgggttaggtttgcagactaccacccgagcccgatcaccgccctcgctttcacgcccatcccctttcccaaccctgaccctgaggcactcgtcgatgttgttgaagatcagatgggagcgttggtatgtgcgaggcaaaacggagaggtacaggtctgggaatgggcgcagggggaaggtgagggggatgacgtagaggctatcggttccgaaggcaaggggagttgggtgttgcgaagggtgagtcgatgacggggccactaatggctgctgcttcgagatggctccgtgctgataacttgaagctgtgctttctctctcttgtaggttctgcccagcatcctggcgtaccctaccatctcgttgatgacactagccatccgcgaccccgaggcgttctaccatccaacatctcaatccagtttcgacgaaccctcttcatcgtcaaccaatacctttaatgagcacaaagctagactaccgaggctggatgagttgaggttgtttaccgcaggaagtgattcaggggacttggtcgagaggtgtctgttcacggggaggatcttggtgagccctcgttcgaaatccagcgtggacgtccatgcagactagctgatacatacaggctcttcctggggtcttgacgtagcaaactactccgctaccttccggcccaatctggtccctctccctctcccctacccatactcacctcgccatctccacttcggccccacacatccacctcttacagctcgacccaacttcccccgaactctccatcgcgagcctcaattcgacctcgggtggaacgggcgtaggcagcagaatggaagcattaccaggaaaagtccgaacattggggatcgcctggggtccacccggacgtcaaaaggtcaaactgagcaaacacggcagggagctagacgacgaggagacttgggtctggaaacccacctacctggtctcggcgcattcggattcctcgttgagaaagttcaatctcgccacggggagggtcgtcgggaggatgagcgtgggcaagctggctagtcggggtaccggcggaaaaagcaggaaaaggcacagcgtagtctgggccgtaggatgtttgatgtgagtcgacggaagtcaggctgcgagaggcgaaagagtggcggcaaaagggctgacctcggtggacgtgttgatgatagcgacggaacgatcatctcggcggattcgttgggacaggtcacgttctgggacggcaagagtttggcacagatcaagtcgttcaaggcgcacgcggccgatgctttgtgtctcgtcatctcgcccgtgagtcgtggcaacgagtcgttcgtgtgacgatcgaggagcgctgatccaggcgtcttaccggatgatagaacggtcgagcggtatacacctctggacctgatcagcgagtcgcacagttcacctatgtgccagcttccagcgccaacgatccggacgagctcgccgccggacctcccactgcgtctttgggagaatggcaacagacctcgattaaacgtctccacaagcacgacgtgaggacgctggccatgttcccggggtactcgctcgcaccgcgaaacagctcgcccatagtcaacccgaacgtcgctcccgttctcgcctcgggtggactcgacatgagcatcgtcttgacctcggcgggacagacgggcggtatggctcgacgaaagggacccctggcgatcaagtcggaacgcaacccgatcaccaacaagggcaaggatacgtttaacgatgccgtcaaggtggacctcgggtacgtgcccaggggtcatgggtcggacgtcatcggagtggctagggagaaacggatcgtcttggtccgacgtcaacgaggggtcgccttgttccgggtcagggagatgagaagtcgagggcaagaagccgaggacgagaccgtgcccggcggctgggacaaggtgttggagatgaactttcaggtaggtcgtcggtagcatgtgcgttccgaacgacgtccgtccatactgacatacgtccgctcgacagcttcggacgagtctgacatcggcggccatctcgcctgacggacggtggttggcagtttccgacctgtacgagaccaaggtgtacaagctaaggtatcatgtgagtcgcccaggtcgccgtctcacaatgccctcgttgtcatctgactggacgaccacgcctatgctcgtaggaggacgccgatgacgactcggtgacggtacaacccaagcggatcaaggcgttcacgtcgctcttggaagagtccctcccgcatctcgccagtgggttcgcccgtcgaggtaccggtgcttcgagcctcctctttatgcccgactcgaacggcctgatcgtcggattcgccatgcactcgcatatggtcgtcgtcgaggtcggcgcgagcgatgccgaagagggtgtgagcgtgttgaagagctttgctgtcccggtcaaggagggtcagcgagcggtgcaagggttgccatcgcggacgatgattggcaaggctgcaaacggggacgtcaatggcaacggccatgcagccgaggtggacggggacggggacgagagcgcgagcagtgcagctggagctgaacatcgatcggactcggacgacagcgatagcgaggacgaggatgagggtaatgcggacgttcagcgaccgcggttcgtcctgatgagcatcagccaggatcttcagtggctggccggtcaggatagttcgggtcggataggcgtgtggagtttggacgtcttcaaggtgggttcccggtcgattcgcagagacttcccgatgtgcaactgacctgacgtgaaacctcgctctcagctccactgcctggtacctacgtttgcggaaccccccaccgccatgacgttcagcaacgcgtcgacgctggtagttgcctttgcgggatccaacacgattcagacctttgacgtcgacgaccgaaggcttttgctcgggcggaccaaggtgacctacacggacgaccgagtgctcggactggaacccgttgtttcggggccatcgtcgaccggccggggtaaaatcttggcgtggggaagcaactgggtttcgacgctggacgtccctgagggagattcgttgaccaaggataagaagacgaggaagcgacgcaaatcagctatggtccgaccgaatgaaccgcgctcgacgaaaaagacgatgatcgacacggcggccgaggaccctttccggatcatcggtcggtaccgcgaggtcggcgccgtggccatgatgggaggccacgagctgttggtggtggaacgaccgtttaccgatctgaccggtttgccgacggcgtttgtcaagccgagatataatagctaagggaagggtagggcgtcattgtacaacatgtagatcggagtgatcgccagagtcgtagtattatatatcccacactgttacgagcgaaagggtccggtaaagttcgctagcagcttttggcgagatggaagagatcgaaaacgttgccgaggctgaacacgcgtgaggcagggggacaagtgaaggaggcaatgtagcggttgtaggccacgttgggcgggaccatcgcccgcacctaggcctcggtgagagcgacaatgtagccgttcttggggaaactttttttagtgccgagcttcttgtgcgtggcatctttggtgatgtatcgcttgcgatagaaccattcgcaatgatcaggaagatcagtatgaaacccgacgctgacgtgggctaaagcatgtcaggtcggggttcagtacaaagatggcggtgacgacaacgccgatccgacagagtacatgacgaatcgaaactcacattcgacggtgctggtctcgaggacttgctcgtgatcactcaaaaagacttcgttctgcttgaccctaggttgggcaaccccgggagggatctgttccgggtgatagaaccaggttatgaggatgtacacccgagtttggtcgaccgcgccgatgtaatcgatacgggcgagccactcgggctcattctcgacgtcggatttgataacgcaactgtggtgtccacgaccaagagagatgagcggttcgtgtatttggcgacctaagggtgaacgggcgagatgatgatgacttacacgtcgcctaagccaaaagtggtgtcctctggactcaaatcttcgccgttcgaatcgttctcggagctcagcttgaactttttgtaccggtggaaaacggcagtgttcttcaactcggtcggggtgctggatgacggcgacgtcaggtccatcagcgggaaaatcgcgttcaggtcgaaaggaacagacacaaaacgtacgggacacgcggctcctttccctgacgaactgggatcttggcttcatcctcctctccgtcgacctgaacgctcagattgttgttctttgttggctttgcctttttaggagcgcgaaggactgcttcctcaactccgtcttcgctggtacgagcggtccgtttaagaggtcgacctgtgctcctgaggctcttaaccggaacatcctcgacaagatcgtttcttcgtacgctggtacatgtcataggatccgaaggaccggtcgtcccgatttgtcgagtgggcattgtggtgggtcgagcgtatgccgcagtcgtcccggtcggtgatgagaaggacgtcaggcagacgactttgaaagttgcgggacgatgtagaaggcagagatcgctcaagggcgcaagagctcgtgagtggctaggaaaaggagctcatatggcaaatgttgatgatgggcgatgatgggcgatgatgggcgatgatgggcgatgatggacgatgatgatacctggtgatacgaatatgatcatgggatgatggatatggattgacccgaatattggaacgatccacattttgacgcgacgcgcccggaatctcaagtatcacagagagaagaaacacttattgttcgttccaaatcaggtcatggtatcacaaccatctcatatatcagggaaaattgattaggagattatgaacggtatcttggttctcatgtttctctacatggtatagtaatttctcgcagacaaatcggaagggtatatgtggctccgcaaatcgggtcgccagaggtgggggagtggtcgatcacacagatcgccacgctctgatctcatttcggtcgttcctccttgtctctgcttgcccgggaacgtgacagcttcgtccaccgagtcttctcagatcctcactgcgtcaatatcgaggtcgatttcctagacgttgatctggtgcaaccaaacctcctgctcggcacgcgcagagtaggtgctgacccgcagaatgtcctgcatctgttggtttccaacaaacaagatgtttcgggcgacgaagaatcggattccctcggtacaaggagggctcgtcaaggatcctgactcggcaaaagtcgtcagtatagctggtgggttggcgacgcgacgtgaactcccgaaactcacccttgtaagtccagaactcgctgaaccagttgacctcctccatagctgccttgggggacatggacgtcgtcgtgttcttctcgacctccctgaaactgtagtagtccggcagaccgttgaagaacggcgagtccgagttaccggggtcgatacggaaggcgagcacggcacggggtttcccagcgctgtccgtatgcacgaaatgcatctcggccttgcttcggtccccagcgacagagtgatctgcaggggagtgaatgtgccacccggtcatgtagaccgtctcgttcgtaccattctcctcaaaggtgaaactgggcagggtggtgtacacgccggcctcgtgcgcgagcgacatggcaggtccgtaaccccagttgaaaaaggtaccgttggcactgtcaccatagttgaacgaggggacgtgcgtcaaggataaaccctgagtcaagaggagcgggatgggggcttgttgagtaccagcttgacacaggtaatagtcctcggacagttgaccccagttgtaagacgcctcgtacgcccatcgggtggccacgggttcggctcgtttaacgtggttggtagcgtggaaatcgtgctcggggcaggccttgacgatggccaaggcggcgagacatgagatgaaaagtttggcgagcatgtcggtggtgatgggtggttgatgtaggcgggattgataaggtcgacgaggggaagaggatgaatctatgatgccctcgaagcttgactccactaacccccgtcgacctcgatcgccccacctatttgtacgtctcccggaaaccacccgccatctctccaatgtcccctcgttttcatggctccaagagatgtccaagagtcgacaacacatgtcgtcttggatcgacagagatttccggggacgctgcctttctctgttcaacaaactactcccgcctcatcgtgacaggtcccgcgcgcttggaaacggaaaactctccgttcccgacatcccccccgtgcctcgctcgactcccaaggatttcttggcagactcatccaggtggtctatctgcgggggagtggaggaacctggaggttagtcatggacttgaacttgaacttgaacccgctgttcatttcgattcgatacaggcgagcggggttcgaaggagggacccccaacctcgggaggttttaccccgccttcaacgatgtcgggtcgggtcggcactggccgcaacctcatcgatgccaagaagagacaagcaggtcgaaacgtcgggggaactcgttaaatccctgacgcctctgtccccgtggaattccgttggaaagcttgagcgtgttgcctggcatatgggggatggcgaatgaaacgaacggaaggcatttcatctcgatcacgtagaacgttgttggtccgagactagcaatcgaccgtcagacgagctcgtgttcttcactcgtgcacagccgggaacacgatctcgagctgggcgatcgaccttggctcgcttgatggctcgagctctatcacaatccagagtgtgaatcggtgtcgtgatctcccgggtgttcttgtgtcgacacgtgtcacttggtgaacaagctctcgagcaagtcttggtacgacgtgtcgaaagtcacagcttctagcgtgttcagcgtgagcttagcatctcgatcacatctcgatcacgagcgaattgggggatctgatcggaacaacgtcggccggagcgatcagatgccgatacgctcgagagtatcgagtctgagcgatctgtcaagggtagccatttgattcgagatatgcgcacgccgccaccgaacgatggggagaaaggcgtggcgggtgtcgggcatgagcacagtccgacaccagtccgaagggttagcctggtgtttgattccccaccatgagtgaggtcgggagtaaccccgtctcgtagatccctgtatgcatgactgcatgcgtaactcacgaagcacaacgcattacccctaaaccctaaaagtgccggtcatggcgaccgaaacgcgattctggacttcgtgaaggagggcacagctgtgacatgctcacggaccgcaatgaaacgattggggctggtattccgaccaatttgtcttcgagtactagtacatgatggttcaggattagatagcagaaatacaggttgaaagacctgatttgatagacgttgtgttcatgctcgagtcttcgatcatcagtacccgtattcctcagcactggctcatcaaggggcgcaatcgttgcttcaaggtctacgggaatcgatcaaccacgattctgggccgagtgtctcatctttgccagagacgggtagcaacagcagtcatgcggacatcccgtttttgaaaagcagacgcgatgagggaagcctcatcatcccgaacatttgctctcgtcacgctttgatagatcctcgaccgattgaggtccactctaatgactagtttaagcttccgtgcaatacgacaattcgaatcgttatctgataataacgatctttgaaaggcaccaagcgcaacttcaaatggagggcttttgcaatcgacgatctattgatgtgtaagacactcagttttcatgagaatggggactggtgtcatcaagatcgatatttttcactggtcaggaaaacgggttcgcgagccctgtgacggatcgcgatagatgaagctgcgaaacaggccaaacacctttcaaaagccacggtccgaccaaaagaagagctatgcttgttcctctcgggttttttggccacactgacatcagaatcgataacgatgacctccaaccgcttctcataacgttccgtgaaaggctggaaacaaggcggatgtgaaacccatgattgatcaacctcggttacgggcccgtaccttcggcctgccacgcgccagatggccttctccaggattgctgaatattgcttcttgcagactccgggtttgtaagcggcgtatcatatggtgagatcccatcggtgctggccgtgagtacagagagatcgacaaatgacgcattgctaaatggggggatcttggctcgcaacgatgacgacggcgtggtccggcgagttctcgcaaacttaccggccgtgaatattcgccgatgccctcaccggctggccactatcatgctgtattcatgcagcatccgacactcagcttctcagtttcatcgagctcacgtgcacaaccaaccacccttgctgctctcgcaccagacgccccccggcctgaggcacctcggtcatcggattaattgcggataattttcgcgtttcggatgattttcgcgtttcggagttgaccgcacgcgctagtagccagttgctcagtgacgtcttgcgcttcacagatctagatatataccttgattcgggtcgagagtcaacgacagtgaggggctccacttcgccgggccacccacttactcacaagctccgggattatcatcatcaacatgttcaagaccatcactcgtaccgtcatcctggctttgatggcgggaggcattgcggcccaaaacccgacctggacgaattctcttcgaggtcctttctcacccatctcacttaatgcctcggatggctccatctcggccgctttcatccctcatggggcgactgtcaccgaattgtgggtcaaggataagaacggtaccgccagggacatcaccctcggttacgacaacaagactttgtttgcggacgacccggggcatccgaactttgggaccattgttagtgaacaccgtggacttggccggcgtcatccagattcacagctcgcgtgtttataggttgggagatacgccaacaggatcaagaacaatacttataccgaccctgaaaccaacatgacctattatagcgaggccaacgagaacaaaggtctcgatacgtgagtccggcgcggcggctacacatcggttggcgggctgacccacccgtcccttgtgttcagccttcatggagggccctacggcaagtaccagagtaaaggaagcaccatcctcgcgagctgatgttcgtgatctgaaatcacaggctggagctggcgcgtgtggaccgtctcgaacgtgaccaactcgtccgtctcgttcaccttctatgatccaggtcagcacatctctgagacgaaacgccatgtctttgtttggacaaggctcatccttctcttgaatgcgcagagctggtcggaggtttccccggtagcgtcttggcagagatcacctattcgctcttgcccggcggaatctgggatattgtgctcaatgccaacgcgtcagccaggacccgtatgtcgtgatcgacggctacgaattgtgcaccaaacctgacgagcgcccacgtttgcagccatcttgttgagctcgcatgtgtattggaacctcgacggttacgctggaggcaacgccaccgacgccgtcaaggattgggaactggccatgccgtacgctgatcaggtcgtcgctacggacccgatttgtgagtgacggtgatccgatcgacatccgccttttgctcatcgaagttgagtttgtagtgattcccacgggcgagttcattaacgtgacggacaatgcgtgagcaagctggtcatctacgtgtgcttgatgaggtcaacgatgttcattttggtcgccacgcagttataacttcctggagcgacgacccatcggatcgatgtggaacgagacgttgggttaccctggcctcggaggatatgtgagccttgaatggaggcttggaatatgtgggaaagtgattcacaagtgctttgcagggatatgacacttgctggaggaacaaggtgcgtcggcgatcctacattcattttcttcgcctgcgctaaccaagattgaaccgcaggcttcggtgcctaacaatgctacagttgtgagtcgtccatgtccgataaactctgcaagatgctgaaccgacacatgtcacctcagctggaggcgtactcgcccaagtctggaatcaagatgtccgtgacgaccaatcaggaagctatccagagtgagtttcgctcgtgatcaaatgaaggggcgtttacggtactcagccgaatctaccctgctagtctacacgtgcggcggacagaacggttcgatcccggtcaagagctctcaaggtagtggattctacgaaaagaacagctgcatggttgtcgaaatggaaggagtcattgacggtgggcaaaaggtcatgttcccgccgatctcgaaaggtgctgatgcttgtggaactcgccagccatcaacaacccggaatggtatgtcacgtaagctctcgaaaactcacgtcgcctgctgatcgtcctccctcttgaaactcccaggaatatcgaccagtggtattcacctgaccgggcctacgaatggcgggctacgtactctttcaccaccgagtgatgaacagattgaccggcaccaagtacttcgtcgcgtctttcacaagagaaaaatcgattgcttcataattctgtacacgtcatgtagtctatgtctgttcatccggaaaatcgtgacatgtcatcttccccgtccgtgtcagatgaccgaatcactgcccgtcagccctgatggtgtgtttccagatggccttcaacagctttgtggaatccttgggcgtccgcttgaatccgtttgctcgatcgacatgggtcacaccgaagcggggtgcaaagccttggttccattccagattgctgcaggggcattccacctaggtcaaatcgcgtgccaacctgctaatctccgtgcgaagactcactcgagtaggctccagccgaggtatccctccatcctgatcccctccttgtgtgcctgacagagctccttgagatacagttcgtaatactcttggcgttccttgtcatctacgatctgcttcaatgaccgttcggcttcgtcctggatcgcgaatccgttctcggtgatgatgataccgaggtcgttggggccggcgtactgcttgtggacgtggttcaaaagctgcctgaatccccagggcactagaaggggacgtgtcagttcgacgttggggtcattgaaagggaatatgtcgccgcaccggtataagggtgaccgttgtgacctttccgtccgatcggaacaccatccttttcggccacctgttcgaccccggcgccgaagaactggaaaccgctgacctgacccttttcgacaatcttgccggtggcccatttggtaccgtagtggttgaggccaaagctgtcggataattcggggatgaacgccgcgcaattgcgagggttggtttcggtcgtcgctcacaaatcggaagaccccttgatgattttccactcgtccggggtgaagtcgggcatctgggggtacctcgctttgagaatactactattttcacccttgactacaggtcggacatcagtatctggtcacgaagaacgaggccgagacgcctactcacagacggggtcagcgaactgtggacgtgcagagaaaaataggttgagagactttgatgagtaaaggaacactaccgccgtgtcgattactcggcgaactcacccatccgagagccatggcaatagcgagatcggctgcatccttggcttccttgctgtcgtcgattgggacggtccagtcgatattcaatgtgatcccaattcttcctccctggcttgattgatacttttgtcgataaagctcgaccgaataagcgtgtaccaagatttgacggtgggcgacgctgagcgatggtatcgtcatgagctacgaaacacacgacttgcgacttggcacaaggtcgatctgcgactcacgtccatgggtcgttctcaaaatcgcattccgaattgatgactacggcgtccaggatcacgtagacgaaaggctgcagcagacatcctcactgtcagtattgatgagaccacacattgccaagccacgggcttacctcgttcaaagtgatccagttcttgactcgatctccgaaccgggaaaacaagaggtccgcatacgagacgaaatcatctacgatatccgccttgttctcgcaacggaatccgcggtatcgttcttgtaaggcttgagggagatcccagtggtaaagcgtgacgtagggttgaatgccggcttccaggagggcgtcgatctgcaagggtagtcaccgatcactgagcgagagcagcgagaatgatttataagacgggcaactgacgagcttgttatagtactcgattcccttttcgttgatcggatcgttcttgccacctgcgaagagtcgccttgtcagcacttcgggattgattttcgactcggcacaatctgacgcacctagcggcttgacacgggaccacgagatggagaaccggtaggccttgcatccgtacgacttgagcagttcgacgtcctctttccacatattgtacgagttgacggcatcattcccgttctcttgatcctttagacaaatgtcccatacgctaggacctcgaccgtcttgatcgtgaccgcctgcaggtacaagtctgataagcaacgtagcgatttaggtgtgggctcgaggactagccttcaatctggtagctggcactggcgtatccgtgagcgaaatcggcaggcaaaacgccttgaaggtcgggattttctgataggggcgacattatcaagacgtgagttgtgtagtacggctatctggcatgatagcaggcaccgtggaggggtggtaccataccggcgtccgctacttatataccttgcgtttatattcttggtttgctccgactgaggtttctccgctgagcttacaacgatgaccacggacgagggtgatgatcgttcatccgaggtcgagccgatgagccacagggccatgggtgtacgaagaggaggggggtaccatgcgaggacgagggcgacttggctatcggatcaagttggaacgtcgaggtttctccgattcccggcgttgagactgtgctggcaaccttcttgactgcgtaaggccttgacaatcacgtcgccctatatatgtccaggccgatcctgcaccgatcccgctgcagtagacaggtgaacctggtgccctctcagtggtaatgcattgaacggtcttttccggatagccatgtcaaaacgggggttccagttcgaaatcgcgttggatgagaacgtacggcgttcctgaccttgacctacatgtttctccttgctactcaatccatggagcgcacgtcccagtcttattcgagctagcttctagataatcagcctgcaatagttggcagagcggactcgatatcttcataacaatccgatccatcctgttttgctccgaatgatacggcgtttcccgagaattccgggttgaacgagcagggtaaacttatgactcgacggcttggacgggcatatcatgctcaacacgccgtgcaactttcccgttacctttgagacctgcaggacccaacttggaaataactttgagcagtccaatagcgattgcccaggatgtcggtgccattcctgaacaagtggacaccaccacccgcgccattaccaccttcggtttcatgccacctcgatactcctccgtccgaatacgacctcaacttttccggaggccctatcccccagcgattcttacgaacggacaaggtcttactggtgccattcattccgagcttgcatgcgagacaatgtcatgccgaaatgcagggcaggacggagatcatgaggttgatgccttatcccaagaacatggccgagagcttggaagagctgttgcaaggggtcgaaatctcgatgaggagtgtgccggtgagcactgggtcatggatgcagtagtctacgggagtccacatactgattggtgtaaagtgacgacccgcagaccaacttgttgttcgccatctttgacctgaccaaggctgacaggccggacgaacaagtcccaggtgcacacccacttcctccggaccatcccccgctcggatgcctggcaggtatcatcgccatctttgccgatcgtaaaaatttgacgggggagttgggtgagtctctagtcggccgtgggctcagggtccggttgtgagaggtggtactgataaggccattctgaccctcttccaggccatatcatcgtctttccaaaagctcaacgcacgcacgtcttgtcccactcagccggcctgctcatgcattacgcactcgactttccctacatgtccacgtacgacccagggacgagaatgttcgtctccgctgcacaaggcgagcagcaggaagttctcggattgagacggttacaatggcaagcccatgtcacgaatgccgcctcgatcaagtcggcggggaggttggcgttcgaaaaggaaggcgtcgtgaggatgcacggtacggcgacaggcggggacgagcaaggtagagatggtgatggagcggggatgagtaggagcaattgggtcggatcgatcacatggaaggattgggaggtacgggtcaagggggtcgtcgacgggctcgtgagtaggtgatgggaagacgaatggcggttgtcacggcgcatcagccgtcgagtcagatgatatctcgatggcaaccatgcagtttccgcaatgtggacagtgggggatgacttcagcatcttgctgggaacttttgagtaaaatgcaattatcgcagaagcggccggccctgcacatctctggcaactcacgagccagctcagcgggttaagtcccgttgagatagtctaactctgaaatggtcgatccagtggccataggaagcaggagatcgagatcgtcgattcgggatcagaggtcgctgtgatgggtaagcaagcaaaggataacagacgagactcgggcaatgtcaccatttcgatcttgccgcttaaggcagccgacatcgctcaagtccgccgcgatcgatccgcttcatctggcatccatcgacgagaacgagcgagtgaaggtggtccaccgttgtcgtctctcatggtagaggccagatcgcccttgattcatcccaatgtcgtcgcatcgagagagtcgcgtgggtcgtgtcatgacccctaaacggatgattgatgctcataatcgcgtgcctcatactccgctcttgatgggcatatttagatgacttgtcgacggatagcaaatctcttctgagaaaaatcctaagcgcgataggccgggaggaggtcttgccatcggcctgccattgtaaactgatctgtgtcggctggatgggacgtccgaaatcactcgtcatcattactgctccgccccaccaccgcccggcacggagaagcagcaccagacatactcaatcgtagtttgctgatcccaagtacgtctccgtgacctgctgaagacctggaggtgcgatccctgctttcatcgcttgcggatcacgcccgttttgcggcaatggctacctgagtatgttcatgggctgtttgatcataaacgatatcgataggggcgaacatggaatccgacaactcgtttcgtatggcgttgccgtaagtggttccatcaacatcggaccagagatgacaaacgcacggttctcagctgttgcgtatccttgtattccgctgtgtaaggatagaccagcaaggaagaggataggccagcgaggaagcggattgcgcattgtaaggctcggtctgtcggaattgagacgaggatgtccgatattccgtccaattcctttgggaatgttttgctgggcggatctcatccccatcgctcagcgggaccgatctatattcgagctcgcgcagcgcatctctcgaaaagacgtttgtaaaattgggttgacatcgactaatcttacctggaagcgcattgtcggtctccttgccgcgtatcttggctcctttgaccgtctgattgtgcgtctttatcatatctgctccagaagatccggccggactccttcgaagcgatgaagcttggagtcgaaacagctatcgaacccgcgacgacttcgacaatcttgctgtcctggagagcatatcctatcgcctccggtcctcgcaaggagacatccatcgacctgaggacgaccacttctcgagagagcgaaatgctggcgaataatggtttcacgaagctttcgttcggcaataccttatggcctgacgaccggctgtatggacgaactttcggtctctgggataccgatcgatcaagatggcttgccgggaacgcctagagcgagaaagtactagaggaagagcgcagcgggagatcctgccaaccggccgacgcggaatgtcattcaggtcgaagaggttggtaaacatacgaggagtagatcatccaggttctaacgttctagcaagcggatcgacgcgacggctgttcggttattcggggatagagcaacaagctacaagctgactccggacaacaacggctgccgaccccaagtgaccgaccgcgcgggctaggggggaagataggaggccgaggcatgaggtaaccggtggttggccatctcgaccggactgcactgctcgaaccgcaccgctcaaattgccattgtacgtatatggcaatggaacgctttcggtcgaggaggagaagatctcggaaacacatcgcatattgtaacgctcgtgcagctcgtctaagacatgcatctcacctcgttgggttcctctttcgccgcgggttaggggttaggggttaggggcccccccactctgtctcgctcgtctaaacaactgaaaaagtctcgctagcaggaaaacgaagaggacgagcccgagtcccaggtcgaccttgtacgaagatatagacacagacgtaggggcaagggaagagaaagcgatttcatatctcttatatgactcctgagggcaccgctggacagcgcgtcgaacaggatatcaagccgcgtccacctcctggccgcctccaattgagtgaatggggcaagaggacctcctatgcgatttgattcgagatctagcaagagaggcgcgtctcaccctcacctcctcccccttgaatccgacctcgagtcaactcgtcgtacctcatccgactaccccactggtcgagatataacctccagggacctcttctcccgtccaagagcccctgaccccggagtcagagatagagccatacccagacctggagtttacgactaggaatagaacaaaggtcatttgttccacagtctcaaaggtcttgggtagcgttacgatggtaggagacccgtccatcctgctcgtcagacgactgaccgatacgtccaggtcaccggaccttgcgccgggctggtcgaggcgcggcgcggtgcggtggggttcgtaccttgtcgagtcgatacagaggttagacgatgatgccaaggacagcgataaagatgaaggtccatacgcgccccgctggaatttgatcctgatcctggtcgttggtctgaatctggatcggatgggtccagactcccgggacttcgggccgatcttttcctggattcgcaccacaccacacttcggactcgggatcctcgggctttcgaccttcaacctggatatggatccggaactctccccggggcctaggaatacgctgggccgtcgtcgtgattttgagcgatgccagacgcaaccacaatgaaaaggaagagccgttcgtcatctcgctaggacgacagtcgtcgccgtgggtcaggacatggcggggacggctcccggcatggtcgtaccacgaattacccgcgaggggacgagatgatgccgggtggacccatgcatcgggagttcaagtcgaaagcagagccccaggtcgatttcgatgggtcggaccgggtaacatggtatacgtgtgcccaatgtgcggatttccatagaatctctctcgtctcgaatcccgataatggcggattccaggaatctcggacatgtagtcgtccgtcgcatccgtccacctgtcgaccagtcaatcgattattatcaatcgtcggaatggacgttcgcgatcccggggattcgcgtaaaatctagaatcgtttggaatggcgaaagatacgcgcatcactctcactccccctcagcctagtcagtcttgatggcgctctcgaccctctttcgcgcgggatcgaccggcccgaggcaaaggtggatcatccggctcgacattgtcaacaacgatatacctacagggtgacagaagaggtcaacacagatgattgaatcgcatgtgatcaggcgattcaggcggaccggggtagggggttgccttcgagccggttgaacgcgggggagtggaggtcattccccgcgtgtttcgcttggcaagaagattttcgccggtccactgcatggcaggggaaaacctgctgcgattgcccctctgcccatttctccggtgcacacggggacacagcgcgagtggcgaggaaattcggtcggtggatcgtgtggatttcgttgatgaactccaattgttcccaaaccaaaacccgctgacctcccgcttcgctcgaaaaagaaaatatcctgattcggtcatctctcatcgtgatttttttttgcctttcgatcacccgccgcgcgtatccgccgaagcaaaacacgcgcgggggggggggggaagcctgctgacaccctttcccccccgcgcaacctcgcctgctcttgggccttgcccccgcactcgagtggcttaccgggtcccgtggggccggagtccgggccgttcaccggaccgtgcacgatgccgctcgcgaaacccattacgctcgagggtcatccatcacgatgggatcgatatgggcaaagggtcgtgtatatatagcgatgggaggatgacattgctaccaaccgtcgtactcagcctttgacctacctacaagcaagcaacaagcagagccggcaaactcagactttcaatttctgagccgacctcacgagccgcagcctcgacaaaccaaccgctcggcacatcaataaggaaacctcccgcccccgcgtactccatcaagatgttggcaggattcggtttctcccgatcccaggctgaacaggacgcctgggaggtcaaggcgtaccaggacactttggccagtcgagtcgccgaccaccataacggtctcggcgacgagacctatgacgccggtcaagagaagaacgctggaggttacaggcaaaactaccgagccttcgtcctcgcttttgctgcctacatggggtgagtgaaccaacttcggtcatcggcgaaacgcgcgcgcgcgcacatacacaagtcgaaccaagtttggactaacgatcgattttttgttacagtatcgttctgttcggatatgataccggtctcggaggtggtgtcatcgctcaacccgcctttattcgtgacatgggtattaccgagaccggcaaggctctcgctgatattaagggaaacatcgtctctatcttgcagggaggagtgagtttcgacacgacggtcatgccaattgtcctgccgcgcttacctcttgcccgccaacgttcctagtccttcttcggtgccctcggtgccgcgcccctcagtaacgccatcggacgaaagaggtccctcatggtcggatgtttcatctttgccgtcggtggaatcttgcaaaccgccggtccttcgttgtcttaccagtacgctggtcgattccttgccgtaagtttagcgagcggcgacatgctcagtgcatgcatgttcctcgggctgacctcagacatgacattatagggattcggtgtcggtatcgagtcttccgtttgtcccacctacgtcgccgagttggctcccgccgccatccgaggtaacattaccggtctcttccaagtctgcgtcgtcaccggagtcggtaagtctagtgccgcgtcctagtcatatttcaaaacgtccgtctctgatcatatctgcgccccgccacgacagccctctcgtactggatcaactacgcctgctcctacctgggacccaacgacaccaacgcctggcgaattcccgtcgctatgcagctcgtctttgtcggtctcatgtccgtcatcatccccttcatcaaggaatccccccgatggcttgcaagcaagggtcgaaacaccgaggctctgaggaacttggcatgggtcagactcaggcccgaggacgattaccgtgtccaagccgaactcgccgagattgtcgccgccgtcgactcggagaaggaagccatggccggtgcttcgtggaccaaggaactcaccgccaagggtaaacccaagaggttcttcatcgccatcatgatgttcgtctgccagcaatggtcaggtcaaaactcgtaagtctaggttctgatctcccaatcgagaaaatccgctgaggtcaggtctgcatacctcttaggatcaactactacgcccccgagatcttcaactcgatcggtatcaagggaaccaaggcctctctcctcgcttcaggtgtttatggactcgtcaagatcgtcgccaccgccttgttcatggcctttggtgtcgagcgtgccggaaggaagaagtactttgtctacgggtgagcaacgacacggtctcgaccggcctcctgtagggacggtgctgatgttactctttgtcgactctgtagtgctttgggtatgggaacctttttgatgatgatcggtgccgtcttcaacacccacccccctgacaagaacgctaccgaggcttcgggcgcttccatcggaatggccgtcctcatctacctcttcgtcatcccttactgcttctcctggggaggtctcgtctgggtctacatctcggagcttttcgacaccaggtccagggcttacggtgagtctcgtgtcgcgaagattcgagatggatccggaaggctcgactgactcgactcttcttgaacgatataggtatcgcctttgccaacgcctcgcagtggttgaacaactgtacgtctccttttgcacgcaactaaagctcgactttcggaagactgaccgacttgtttctcgccacagtcgccatcacccgaactactcctttgatcgtcattgcattcaacaagggtggaatcttcttcttctttggagctttgaacttcctcaacttgtgctttagtttgtggatccccgagaccatcaaggtaagtcgggatgacgagaacacatcgccgaacggtcgtctgacagcgcgcttttacctctcctacagctctcgctcgaacaggtcgacatcatcttcggctcggtcaccaaggaggaccgtatgcgagccgtcaccgagcgattcaatgccggtgctgctggtcaggcctacgctgagaagaacaagtcttcgatggacgacgatgagaagtacaccaccgacattgttcacgacgagatggccggcaagacctcgaccaggtaaaccgtttgcggacgtgtttctggtcgacagagtcgggatcttgttcattcagagtgcagaaagttttgtataatccctagggacgtcgacgagccaagtgtatgtcgagaatcggagggtaaacatgtaatcatgggtagcacgatattacacagtatattcaactccgcctcggaggggctgtcaagcgtcttccagagtctgtgtgcgggacgtgaaagagacgtctggtgtttcggactttcggttcttcggactaggttcggtctgaacgcgatcaacgggacgaggcgcgacatgtgacaccgcctccgcatctatcgcattgtttcatcatgttaccttgttgaatgtaaacttccttgaacgcggctgaagaacgattacctttcacctcgctcgccgagattatgggcctatctatctagggaatagacgataagcatcttgctgagacaccgctccaggaaaccgatctcaatcgatcggctgaaagcgtacgggttctgtctcgccgcggtgaccttccgtcgaatgtatattccaccgtagatagtactcaagtcccggtcattgggtggcatgtgagggattgtctcagacaaaattgcgaatcgcctggttgccgccaagatgtacctgggtcgctaatccccacagactgccgagcgccttcctctgtttgccccgcgtctccactatactgtactctacatatgaaaaacgtacttcgagttcttttcagacttgcaacgtcaaggtcatataggcgggagagcccgtccgcgactgacttgatcgagatggagagatggtggagtagccctgagcgtcagtatgagcttcaagcatcactatggatcgcatatctcaaggtcctcccgttgaataggaataggactctaatgtaccacaggctggacattcctgacagcgcatcaatattgaaaagtatctgcttaacaagccgacgacggatcggtagtctaaaagcaagggcgcacatacaggagatcgtgttccgtctcatctggcagcaaccgtttggcaggggagttgtgaggattctttcattcacgaggtcacgctgtaaatgttgtgacgcatagtgggttcgtcgtcccatggtccggtttgattaattggggaattgaggagtgaactattccatcatttgtggattgagcattctggccagcgaacttcaggaggtcatcaagtctgatacagcggggtctgatacagtgaggtggattggggaaaagaacaggtatcacttggaaacctcgtcgaggggcgtctttgagcctttgagcccggccatgctctctctacttggtggtatccgcatagtctgacgatcaacgggtcggccatgcccaacttgacattccagattatgggcgctcgatgatacggattgaggggaggagaagtaacccgcgggtcccgcgggttacgaggtccggtctgagcggtggtcgcttccatccgtgggtagatgtataccggtcgtcgtcctcttacagaagaagaaaggggtccagagatgctgctgtcttcttagtgggacatcgatgttgtatctcctggcggtatgattacatgctgcgatcactgttatactgacctcacggcccaacgccttgttgatactcaagacctggaccaaacgacgcgcaccccgctcgtgtcagggaaaccctggataggaaaaaaatcgcactgcaccctagtaagattccgtgtcaagtccagcctcacccttgctgcccgtttcacgctcagcgctcaacgacttgaaaacgtcaaccggggcacgctcggcgagtttcacaggaggctgggtcgagatattccccgatacgatcggggaaaccccccgttgcgggaccagaaagaagcgcgtgcagggatcatcagttgacccggcccggggcagcggcggtagtgttttgatcccggtaaagtgatagtagccggtgcgctacgcggctgcaggtgtggtggatccacgtgagatgcggtcgcggatgggaaggcacgagccggagggcgctggccacgggaggggcacctctttttcgctcgcggaaaccacgggctcacgcaggcgagggagagcaagaaccttcttcgatcgactccgacggacgttaacaagcgaaactgggacatacgagacggggtccaaatgcaggaataatcgaggatgaacaatgatcaagaataatgtaccgtcaatcgtcctagttaaaatcgatgaggcagagtgctaatccatttagtgacgcaggatatccaggtaattatatcgctcaatctcccttgaagcggaagataaatactcccaaagtcgacaagagtggggctcagaaccacctcgtctacgcgggtgcggcggcggaaagcgcgcacaaggtacacacacactcctctctcacttcaactcgattatccagggttcccggatatcgacacttttcgtacccagccacccagccgatcaaacgatcgacgaggtcgagtttttgggagcaacagtcttcattccaagatcttcacggtcgagtgagacctcgatcgggtgcgtcactatcatagcaagcggaacacgtcagacgtaaccaaacgtcctcaggggttcgaacggagaaacccgtacgctgcgacagtcagttcccaaggtagtgcgcgacgctttgttacccatcgtcaagtcttggtattcgtgatcactccacggaataccgagatcaagccagggtgcatcatcggacgatcaatctcgacaagaccgacatcgtccgtaccgacctcggaaagcagggtccacaatagcagcacctagctgtacgactcggggataggatgatgatgttacctcctcggcccgtcccgccccacgcccactctcattcactcaatcacacgaacgattatcaccatgctcagggtatgcagatgaacgtcgggatgcaggctcaattgggacagccctcggggcaagggcaggcgtttggtgatttcgggcagatggggtccataccgacttgccattcacaatctacgtcccatgggatagcaaatacggggtactacccgccctcggcttctacgtctacaccgacgtcgatacacccagctgccgtacaggtgccacagatgcatggacacgccctcggacaatctctcggtcaaacgcaggcgcagggtcacacggggatcgacgtgacgaggttggcctcgggctcggggtcaggatcgggatcgacgatagggcaatcgatggccataccaggggggacggggtcaaggtcgagatcacgctcgggttccccctcgggttcggacgagggatccaggtcgaggtccagatcgaggtctaggtcgagatccgggtcggcctcggacgatgggcgggaccaaacactggactcgcgacgttctgcatctcgcgggggtcacaaaagtgagaatgggaacgaggttcaggatggcactgatgacgaggaagaggccgatgaagacgcctcgggggaaggagaggacgatcatcagcgttctttccaggggtatactgcgcatcatcccggtaacaaccaggcttaccttcaacaacacggacacggaccgtcgtcctacccagcatctcggcaggacggtcgacctgatgatccgagccggacttcggtatcgaatacgagtgagcgagtgcctgtagggaacaagaggaaattcgagggggacgagcgcgagtcgaaatccggggcggggtacgcatcggggatgaatcgtgcctctcgaaacgaaaacggaccctcctctggcaaaaaggtcaggtccgggtcgggttcgggaagtcattctagatcagggctgaaccagcattcaaactccaacgccgggaatgggaacgcgggagggttcaggagaccaggaccggtcgggtctggggtggatgcgaggggaaagtctcataacgtcgtcacgggatccgatgtcaatgggaatggcggcggcggcggcggtggagatgacgacgagtgtagcggtgggaatgggcagggagatgggtccgggtccggcttcaacccgaacaggaagcctacgtgtgatatctgtcgcaagagaaaggtgagcacgatcgctcttgaccccggggtttaaccactgacctcgatgcgctcctccagatcaaatgtgtgcgaacggaaacacccgaccctcaggccccgccgatgcagtgcaatgggtgcaagtcgatcgggctcgagtgcacatatctgcacgtatacaaacgacctggacggcccaatagctggatgacgggacagggacagagcaagcgtaaaacatgggacgaggacaagcccaaggaggaaggaaacgccggtcgaaggagatcgacggcgggtaaacctagcgagaagacaaacgggcgaccgcaaagcaaggatcaggggtcgacggggtcgaacgcggtcaacaatagcaacgctccggctccttcagtgcatttcgcgttccctgacgataaaccgatcgataccaaacatggattgttgtcgaacggtaacaatcacatgcatacagacggatacaggcaacagcaacacgtcaatacggactacatgatgaacctatctcaaacgggagaaccaaatttccacacgggtagcccagacctctggaacaacgtctcgggtagccctggacgtcggcatcaacatcccgacttgacctattcaaacaccttgacttcgactgggttgagcgtgcctggcgtgggaatgggaggaaggctcgccaactttgacaattacgggaacaaccatccctcgcagtcgtatgctaggcagactgtagggccggcggtaggcaacatcatacacggcgtagggatcggaatgcccggaggctcgggctcgaatcacggattcgctcacccacccacaggtctctcgccgaacggttctggcaacgcgctcgacgtgcatgcgctcggcaccaacgggacaatactcagcgggggcgaaacgggatcgtaccggtccaactcgatgagcgggaatcagtttgccttgccacctggtgccatctcatcgtcgacacatcaggtacacttgccttcagagcattccgggttctcgccttcgctttctcctggcaacatgatggccaataatcaaatcgcccaacccaattctcactaccaagagccgccgcaaatccataccataggcagcgatagcacgtctcgaggtcgacaagattcgctccgtggtcatcgcagctcgatcccccctgccaagctactccaggagtcattacatacgatgcctcaaatcgaggatgttacgagttggtcgaccgtcagctttttcatctcgctgtatctccgacatttgcacgcgttggtgagtcggtcggagccgtcggtgcgtcgggctggtcggaaagctaatccaggattgtatcgtcttagacgcccattgtgcacaagcccaactttactgtctgcttggcgacacgacttgatcaaaaggcaagtcggcatcagcgaaattaatcctctaagccactgctaatttaagagccatctcgcgagcaggacgtggaatttcgggctttcctcctgtcaatcacatcatatgtcatctctcaatcacccaaaagcagaatgatcgagcactactcgcagagcgagctggaaaagctgcaaaacacgtgctatcgcgcaagtcagctgctgcagactaggcgatacaaggaaccgaatctcgtccaggtcgggacgttgatgtggtgcgtctccgggtgttttttgctcatcgatacttcaagctgaccttgagtctcgcagtgactatttcttctgcacaagcacgggcaaggtagcaagagccactgcgaccatggccgaggcgatcgcgttgtcgtatcgcatgaacatgcacgacgacgcacgtaccgccgcgaacggggtcgatcataccgagattcagcttagacgccgaacgttctggcatttgtacgccattgacaagtgaggacaagcgaggttttctgcttgccgagactgtagctaatgttgcgactctctcccaggaccgaagcatctgcgggccaaccgtctatgatgaacgaccaagaaggactctgttcactaccactcgaggtggacgacgacttcatcacagctcaaggatctttccctcagccagctaaccggacctcgaccatggtcggctttgtcgccgtgtccaagctgttcaagatcatgtccgaagtcctgttccgtcatcgttgcgtggccaaccggttcaatttgagcaaccagtgggaaaacgaccctccaccgggcgatcctaccgccacttcatcgaccatggggatggacgacatgatcaggcgcgaaacggaatggatcgtcagggcccacgatcgtattcgagaggtccttgatggtctaccgcctgatttggctacgcagcgagcagaagtcgcaaccaacccggacttgccgcctgatatgagcgccatctttgggatgcaggtcgccaattgcttgatcaccgccgccagcgtgcaattcgctttggtaagctttaccgcttatcccatcgctatcgcttgtgattggactaacccgcagccatgtttcgcagtacgatttcaaggctttccttgatgctggagcagacacggtcgccgagtcgcaggagcagactgctagagaaatgtacaggctgctttctagcatcccgctcgatcacttggctgccaacggagagagcatggtcagtatcaagagattgaactacgtgcaggagatgccgtttgctgatatcgccattgcccctcgtccagcgaggaaaagtgttgcgaatcattttggccctcttgaatcgatctcgaacgcccgatcagctgagcgaggaggtcaagtcgttctggaacatgtttagcatgatccaattcgtacaggtgagttcaagagggcgatactggggttttatgatcccgagctgaccgctatgccggatctgctcttcatctaggtcatgccttctaccgctgactcggtgttccccagccgcgaagctagtccgggaccagtatctacttagaatagcatgcgagtcttgctctatgttagattgtcccgcttggcgacaatggggttgtgaattgtgactttatcagcatgtcagatatggtcgatcccgcccgcttagtcatctttagtctccctccactcgggctagcttcgtacgaatcgagcatgtacgattcttatgatcagacgactaaagcaagtccgattgccttccgaatagtcaaacccgcctacattgcagctttcattgcccgttgagttacctcgtcgagatgtcgtaccccgatcagcctcgtactgtcgaaacagctcctgtgatcgatcctcacaccctcaatcagatccttaggcatctctcgctcgacccagcagatcaactacccttaccacccgtcgactttctcaagatccacatcggtcggataccttcgtcactactctgggcattcaatgcacctatcacctcgagccgggagagaagctcgattcgggaggtcaaagcgaggaggatgctctttgccgaagcaggaggctcgcgagcccggcagctgacagccgaagagggttggcggcgatggcccttgctctgggagagcttcggtggagatcctttgggaccgagacgccaggcacaggatacgtttgggaccatgcaagacgaggaagagtcaagtctaccagctcgggccataccgactttgtctggcgaaccttccaatgccacacaatcatccgaacagtccttccgcatgcgagaagagtcttcatgggctacgaacgaattcatgccgactgaagctactccggctgaacgcaggaaacaggtcttgcaggtcaacaaattgggcaaattcttggccgagttggaggaggaacgggaatgggaggacatgagggatgccaagcggctggaacggcggcggaatcaagaggaagaagctggtcgggaggaattcgaagagagtagtgatgaggaggaagaagacccgcggatggtcggggtgccggcagaggaccaagaggaagtaaaggtgttgttcgagcggagactgctcgagatctttctcgatggtctggacgtaagtcgcagctcgctggttcgcttgttggcgcaatatcagtactgagatcgactcgcatcggtggctcctagacgcttgactatggaccgatcgactttgagcctccattgataacgaacaagctggtcatacaagatgaagaagatcggtactttgacgaccaggacgaagtggatattgaggccgagaacaaggaaaaggagagcggcctagcagaaggagagtatgactattaagtgtacaagaaatcgccgagtgcgtatccaacaaatacaacattgcaaaacataatgtccaatcggatttgccatccgcacaagccgatcacttcggggttcaattcccgctctttactgcttcgttgggccaccgttgacgatcatcagcccatctgctagcaataatgaggatgtcgctgaaggctgggcggacgactggttgctggcgggaggatgcgaaaggataggttcaaaggttgacaggggttgatcagaattctcttcattaccgtgtggccagtatacgggatattgcattcctgcgaacgtgtgaggggtcgatgccgacgcggtccgattcgggtcaacggtattgtaagatgagaagtcctgcgcgaattctgtttcacaatattcgggagcgtagcggtctggcagagccgccgcaccatcggagtaaccttgcatatttttaaggaaccaagctctggacgtttggtcgaacaccatatctgcgtcaacatgaggaatcggaagacgctgtccactgaccagaggactttcgtatgctaggttgcgctcgcgttgtcggatgagcatgactttgtcttgtttcttcgcaagacaccattgaccaaaggctacagccagccttgcgggatagaagcaccgcacgtgctccacccagcagtaagccatccattccatcggaattgcgacccttatcccaatgcgatccatcatagtttcttgcagatgccatcgctcctgggagtttgctgtatctttgtacccctccggcatccataataaataaatggcgtcctctgagtgtagcaaagcacacgtcagtaatggtaaatattgcacgctgcgtaactcgtagagcttacgagggcgtctttctagcgcatataactggttttcttgaattaagctagctcgaccgcggaacagcttgtcttcgtcgtctagcgacgtgccgattcgcgagagactgcttgtaagctccctttcctcgtacagactaaggtcgacatttgcttcagatagcaggctcgagggcatagctcgaaaaccgagctcgtgatcaagctctacttttgggttgaagctgctcgatttgacatagtcatccaatcttcgcgcttcattcagcttgcccttcacccaatccttgaattcagcttcataggcagtaggaaatcgaatggctggtttgtagatcctcgtccattcttcctcgtggtctggcgttgccaagtatatcggcccgtccacaatcagccaggtaaacccgcctcgaggtcgatctgtgatccatgttctaggcacccatgtacaccttctcgctacttcacctgtttcatcacgatattaaaacagcgcattgtagatcgcaaacaacgacagactcacccgtcgctcgatccttctgaagccacgcgaaaccttttgctaacctccttctccccaacgcaagacctgtatactttccttgcctcttcatcggcatctttagagttagatggctctaggcaggtagttgttaagcaacaaagtttgacgctcgtgtccgcgatgaccaagccaagcttctggcaaacgagccctggcagatcttgcccacgagtatatgtacgtgaaccttctctcttgcctgagtctccacgtgattgtgcaatagcacaaaggagttgtgcaccaagtagaagcaacaaagcttcagaggggcgcggactcgaattgtgccaagctgtcgtgagtgccgcccatccgtcgtcagcattccgtcaattttgacggtaaagtgagtcttcctttctgatgcatgtcgtcatctgcaaagatgtaggcggtggcctaccaggttgcagctctagatgagtgtctcggtgatccgaggaaagatcgagacattgctgtccagcccccctgtctcctgcctgacaaaccatctccacgacggtgcagcatcgagtccaccaggcttgatcgtgttcgtgcaaaaaagtagaactgctgctggaaaatccagcctgcagtcaaacgcggtcgtgtataagaagtttcatggctgttctttcaagctgttaggaagaaacgcaaatcgtgatgccggtcggaaccgggggtggttgaaaagatcgtggagcgggaagaccggtcgggaatatgcattattattgttatatttcgtgagacatatctgcagcgtggtaagttgccgagaaggcgcaaccccagatagcgtgtaagtgtctacaattgagcttgcccagccgaggtcgtgcatagcatcgccccgacgtcccggaacttggcgcgccacccgtgcctctccgcccgtctgattccgcgctctcgctgataaggctcatagtgcttgtcgtgatccattttcgtttcttcaaaaagagctcccacagtgtagtcccggtcgatgtccgcttcgtaagcgtctcgggctgacaagtgcgaaggcagagccgccaacccgcccagcccaaacacctgcccctcatcccctcccacccatccctcgaattccgtcccttctaattcggcaatatcttggaccagacccccgatgccaaagagggcagcgaggaggatgacggcggtactgaagaacaagatccgtgcgaatgggttgttgaacgggtacttgcccatgcggcggcgataagtacgaccgtaagagttggtaggaaaggggagggcgtaggcagacgaggtggtccggtagcgttcgtgtttcgtttgaaatggtcggcgggcgtgttgttggttaggcgtgcgaatttcgttatcgtagttatcgtagaccctgtggtcatgcatatatccagaactcttctcatggcgttcctcttcctcttcgaaccgacgactgaaactgaggacccggcgtcgagcgctcgacttgattgaatcatccaggcagacgataccgagccccatcaatcctttcctctcctcgtccccgggcgtcaagaggatcccgttccttcccgtcctgatattcattccggcgtcgatcacctcttgtccacccgcctttgtgtcgtcctcatcgccgcgtccatcgtgtacagtacgaggagtctctatgaacgcctcgtcgaggaggacgacttcttcatccccatttccatttccagcggggaggaacacccgatcaggcgtcctaggcgtcaacaacctgtccaccattccaaagaccgaatatgggtccacttccggttcaccgtaagagagtctacgacgcgtgggttcggagagagtagggctgaggaggttgtgaggctcggtttcgtgcgtaagagcgggaaggtcgggaggttggtacgaatagtgagagtcgagcgagtagttgtcgaatgggatgggagggatgacgggcaagagatagggagggaggatgacgggaactaggtcgagagcttgtggtttgaatgtgcgtggtttggtctgtccacaggccgagttggatttggggataaaagtactacgatcacaccggaatgttcattagtcaatgccagaccgtatctcacatttactctgtcgatactcactctgtgctctcggctccgtcatccaaagtggctgtcgggtaagagacccttcccagagagacctcgtcgtattcatacgcccggacgcgagccaaaggacccttctccgcaaagggcagggatatggacccggaatccactttcctgatccccccagccccgatcggactagacctcgtacgcagtcgcttggcaggagggaattggctgtacacgttttcatgggatcgggtctggaagttcgggtgccaggtaggcacggcgacgtgttgcgtcgaagatggactgtaaggcgaaaagagggtatcggttgatggtgctgatgaggcggtccggactcgacgatgcgagccgaatgagtccatggtgatagtccgtgtgcgtgtagtttaggattgcagatgtagcaatttgtggtctggtgtgcccatcatcgagaaagcagatgctagatcagactccaagctcaacagcccggattgcgacgagtgtttcttacctcgtcgagtccagaagcgaccgtgcccaagccaccgcgttggaaaagagcgtgacagatacagctgaagacgctgttgtagaccatccagcacgaggtctccaggatgatgctgatgtagagtataatgcgctgataagggataacgaacaagagttgatgttgttgttggtagaattggttgttgtagttcggttgtcaacctatttgcggtagtttcgtcgctcgtcaatcaatttacttccgtcatcgaaattaattccgtacaccgagtgagacggaactataatcaccgaataacggaagctttttgacccaatccggtcgaaagatctggttggggtcttggtcgtcgacggtgtcgaggttcacatcatgcatgacgcagttgcagacagaaggtcacagatacccccggtatccatactaccttccctgcctgaatttcttgccgtccatccaaagtcgcctcggggcattgcgacacctgcacacgcttcgatcctcggagcttttttcgatttacggaaaaacgccattccgtgcgcgacaggtaccggtcggctgaactctacttgacaactgctcaaatctcccggcgttcgacatggggcaaatgacggaggaaaatcatttgaaagcgtcccggcgatcggtatcgtcctggaaggagcaaaatagacattggatatctgacctgccactgatggcggggttcggcaagtgcaacgcgtgaagaggtcttccctcggtgaatgtgttctctcgagttttcagccttctcctgcgaggctcaagtctggacggtctcacaagagattcgggcgattcccgcccgatctgccattgctccaggcttgtgagccggaggaatggcaacaaatatcgaaaaatatagacaacgtcacaatgaccgcttctttgttcaggttgacaagttgagtcgtcgcatgcctaaggggttaaacgcccactgcaagccagacgtgatctgagccgcaggacatcgcaaagtagacgctaggtcagctaccgatcggtaatttatctctacatgaatttgctagtacgaatattcatgtatgggaggacatatacttatgtattaagcctggtggcagtcgcggctcgcaacgcgtgaaaagcaacgccccggtgtgaaagatactccgccctcctcgtttgatgtgctgatcaagcggcccgctgggtgctcctttgatgaaagcgatccagtctgcatactgtaagtactcgagtatatataggcaagagaggggagggcatgggggcttgtgaaacaaggctaccatcatcctcttccttacgcttgcatcaattagcgaacacgtgtcgtctagcactttgcactgttcgaaacgacaaagaaccgttcaatgcctttcattcaattgcaggaattcgcttacctcctcttcctcgaaccggtcggaattgatccaatccagaccgaatccactgagatcatttccggagtaccattagtaccatttgcatcaagttcggatcaatggttgatgcttctatccaaagtcgacaaggatggggatttgaatagcatgctccccgatggctaggtttcacacgctcgtctatgggctgagggagagggatctagctgtcaatttcatcttgagatgaacaactcgatcgagggtgatgaatgggtctgtcaacgaaatgaacacctaagtatgaagaccagattccgttacactcagcaagaaaacgccgttcttgatgccttgacacgaaggccgagaaaactgtaccaaatcaggatgggtcggaaagctgatggtgatcggcaacatgaggcaaaagctccgcaactgaggaaacatacgttgggagccggtcgatcagccttaaaggcgccggcatcgcgcgaggagagtgacagacagagctcaggagatgataacgataggcaaagcttagggtcggacaatggtacgctccagggtgaatcagtgcgaatgtcacgtctacccgggatgtcaaagactgggactgaccccttcatcgcattttcggaggatgccggggaaggagcattcattggtacgacctccggtcatacgatggtaacgttcggtagtgtggttctgagcggtcacacgctagggggaaccggaacgtccgccagctattacccggacaagcccgaagatgcggttgtcggccagcttaagaagttgcagatggaaatggctgcggccgatgttcctggtcaccatgagccaaggaccgaagacccacaggaattgctactgatagtcatgaaacacgatcgaatccactttatcccgatcatccttgtgagtagcccataggaacggcgcctcaccgtccgggtcggctgttggcccgcacattggcgccacagcgaggggcttctggaaacacttccaaaaatctgtaacattatcgatatcttctagttccttccagtattcgggataataaaacaccaacctacatgaggtagtgtcggtgttatccggtctgggtcgaaatctgcgtcgtaagcgccgtcaatcagccaggctcggagcttgatctcattcttcaggtttcagatctcgatcgaaccgttcttgcaagttattccgatcctggcccttccgatgtgctgactcggcttcttgcacctccggaatcattggagcattcactactggatgctgaatatgtagggcgagcgcgagcgtagaagtaattgtgaagccgcctctacgcatttggagactgtgtggttggtattcatgttagctcttccaagaaatccgttttaaacgagatctcttggaactgtccatatcgtatccgtcctgtgaggttcgtgtgcggtaccgggcctcgccaccagagttctccgctttcccattgcccctcgttgcggtaaaatggacagggatccttcgatactgaaggtgtcagcccctgaatcacctcaactacgagccatgctacacttttgctttcaggccgcaatgagaaacacttgcagactgacaaaccccctacctcaccagtggattgatggtagataaggggatcagagctgctgattccaactagtagctgcttttggcgcgtcaagtcaagaggtattcagctgatcttcctttcgaacggacagagttggaacctctttaccaggttgatgatctctataattggagtagaattgggccgtttccaacctcatcctgatgaaccgggctgcactccggctggccaagaaacacgatgcaagggaggaattgggggtaggaccccccaaaacaggtctggcgtatctttcgcaagcgagatgtgaagcgggcagaatcgttcggtcgcaactggcctgatttcaacctcctactttcacaccaatttacgaggattctcgtgtagaaatcctcaatgcccatattttcggaaacgtgggtatgttttggagagccttttgtactctttccaaaaatctcgacccgtcatggtctagcccatgtcacttgtaagattgaagtaagagctatcgaacacgatgcgcgcctcgatgcagccgaaatccacacgtaataaagctcatatcgttcatgttgtatgttgaaggtacaaatgtcagactcgacatgtgaagtcgtataaggtcattttcgtcttagcggtttttgtcagactgcgatcgcaggaggctggtctacctcggtcattctcgtcttcttcctcttcttggggatggaatgatcgtagtgggaatgatcgtgagcatgtttatgcttgctggccctactttgctctgcgattggctctgcttgctcttcttcattcccttgggggtccagccagtcttcccaaccgtctaaggaacgggcgatgcaactcagtatgatatatagggccatgaagctattacccttaccttcaaaggcttcgaacagtttcgtatgcttcttttctgttttctgtttcgagctcatgatctgagatttcgagcgatgtcaattctgcaaatcgatctcattgagtgagagtgacgcgactgaccttttcccattgcgcccactcagagtcggtcagaaggacttcgttcagcgttttcgttaccaggtcctgatcgagctcctgaccgatgaagacgactgtgtggtcgattagtggtcagtctctgttcgagtatgcacggggtccacacggacttacgctcttgtcgacctaaaaattatgtagcagcataagtaagagctgaagcggtatacagactggactactcacgatctccccacttcccgtaaaagtcctgcttgatagcttctttagcgccttccatttcagcgagtggccaatcttcttcaggcgtcgtacagaaccacctagatccgcccgccatcgtaaacatgatacccgcctgcgaccattcgccgtgtacatctggtcgagaggccagccaaatgaagcctgaacaaggtcggaaacgagggaggattcttgagtgtccgcaactgtgaaagacaacacgtagacacttacccttgcttcgaaggagtcccttccaaacgggtgatccgcgtttgaccttggcccgggcaggcaaatccagagcggccttttcggcttgaagttgggccaacgtctcggcctttgctttttcttcatcctgcatctcggtatcttcagcgatggcactgttctcatcctccatctcgatatcggaatcttcgtcgtctccgtcttcgaacgtggtttgcagaatagcaaacggttgcgaaacaaggtcccagagccgacgcgggtggaatggacgtcgcgcttggtaaacgaaagaaccgattccatacctggaaaggtggcgtcaaatcgatcaaccctgtaatctaaccgagttgatcgtattgcttactcgagtgtctcgggcttgggtatcatacgggttacgccatccgcatcggtgaacgggaccttgctgctctccttgagcgactgcaaccagccggcaccggtagcagccttttcgaaatcaaacgagcgagtatctgtcggctcactggcggttcagtcattgctaacaactgggggccagatgattgactcactgaggagttcctttaggtccacctttgagtacgtggtccgtaaaatcttcgcggccgggttcagggttttcacaagattctcaatactcccaacctgttcagtagacaccatgtccgtcttgttgagcagaatgacattggcgaattcgatttgatctgtcaggctataatttcgggactttatcagcgcctcgacgttacgagcctgtgattgaatcgaaattgccttacagatcggtgatattcctctcatcttccggagtcacctcggtcccgtgccgatccgtcaagaaatcggtcgtatcgaaatcgctgagaaaggtcgtacagtctaccatactgacgcatgtatccagcctggcgatcttggatagaccgccttgagcgatgagccgggcgagacgtttccgggattcgggagtcgaactcgggttcgaagggtcgatagggatggaagcttcgatctcggcgagttcgtcctcgttatcgatggattcagcgaattcttgggtgaatgtctctgccacctattatccggcatcaaccgtatgggttagcgatcagtttcctatctccagtcaagcctttcaagctgacctggattggctcggaaataccggaactctcaatgatcaagtagctgtcatacgggaggtgtaagattagtacgcatcagggaattgcgatggtcaacgggcgacttgctcgaaagaaccagcttcggctagattagctacttcttccaacaagtcggctcggagcgtgcagcagatacagcctgcgagacggattcgtcaatcacacgcgcctgtaggggttggtaatcggaagcagaacccaccgttttgcaactgaataagcttttcctccctttgcgtcaatttgtggttcgagatcaaggaggcgtcgatctgcaacatcgacggcatacgagatggcaatcagtgactatgggcggttgaaaagggggcctggagtcatacgttaagagcgcccatatcgttgacgatgacggcgcaccgcagcccatgatctttggactttaagatccaggagagaagggtcgtcttacccgaacctaggaagccggaaaggagggtgactggtaggcgcgtgtcggctggcgattcaacagtcgcgttctcgtgggtttcagatacggctatgggcatgttggcgagcggtttggatgtcatagcaatcgattcgcgggtgtcagggcttgaaagtaaacgatgggccatcgacgaacgaggcaagataaaggaaagcggccttgatcctatatacccctcgagtcgatagcggctacgacgaacgctggaagagagcagccaatcgcgcgtcctcgaaagcagtaatggaatcgtgctttgcacagtcacgatgcgaccgtccaatccacatccactcgttgtaacatgctcgaactcgacaagttctcaaaattcggtttgatcgggttgcgactgactgtctgttgctaatccgagcgatctgactggtcttgcacgagctcgaacgtggggtgatgaggactttcgcggtcagcgacaatcgccgaggtcgcgcgcccggaggtcgagaagacaatcatcgcaagccgtcttgaacacactacgaaccagacgcaggcgctgcctggcttgcatctaatcagagcccttattcagaacaccgatagtcttgtccgccgaccagtatgagcagaagatggccgaaggcatgtcgtgagacacgacacgagacgtgccgatcccattccattagtcgcttagtcgagcccctgcatgaccatttcatgacaagcaatcgtgagcgtcctctcctcattctgagcatctgttgccgatccctcttgtcgctgcctggagacgccggtcaggacaccgcatcgacttcagacgaacagctccaaaacgatatccatcaagctacatttcccagtctcacggttttcccattcgattacagaccaactcgcaagaaacacggtcctcgcaatcgattttcaagaacaggcatatctcttgcccgggcgatcgtccctaagcgagtttttgttcgggttccatggctgtcgcccccttctacacaggccaactcctctcgaccccttcccacctcatgccctagacaccggccttggaccccgctctactgggtcttggtcctcttggcaggtcgttcctccttggcatcctcgagctcatcctcgtcgctgacgagatcgatctctccgtccatatcgctcatgtcttcctcgtccatcgagtcttccgcgtcggaatcgttgtccgcgcctgccgtcgtcaatgtcgtcatggaacatgggaagatcagcgtcaactcttccatcgcaaaggacaacatatgagaaggtgcagagagagagactcaccgttaccctcaaagtacgagacacagttgggaaggacgtcctgccacaacaaactggccagaccgtcctgatccacctgttcggtgaaaaagtggaaaaaggaaccacggtcgcccgcgtcgaacccgtcgtccgaaccgagagcctctgtgtggagtccagccgtaaacaagggggacgaggaggttggttgtcaacggaaagtaagcgacggggggttcctcttggacgacagaaggacacgtgggatcacactcaccgggatcttcacggggcaacaacttttgcaagttcttctcgtccgatttccagttgatctcggtgacctggcaaacggaaccccagggacgggtgtatcagcatgagatcaccacgatcaggtccggtccgcgttgaatccttccatgtttggacgacattcccgacctggccgaccgagcaaacgtcacacgtaccaacccgacgagatcgtccatctcgtcaaagaaagcgatcatctgtttaacccgctccgacgtcccctcgatgacctccgcggtgacccattcttccccctcgggcgccttgccaggtttctccccactggcaccggtagtcttcttgtcatccccctcagaggtggaggatgaaggtgcttccccgatattgtcagggatggtggagatcccgctagggcgagctcgaccgatggattcagaggcggtcatcccgcgggtaggaccggacgtggggacgtaggatttggtaagggtcttgttgctaaaatacgggttctcggaaaagtgctgtcagggggcgagtgggacgttgagaatcgggatcgggaacaagatcagagtcgaggtcagccgatatggaccgcaacggggcttgttttctttactcccccgtccggacgactcacaaagacgatatcgaacgccctgtaatccctagggtcgacgacaaactccatatcctccaaatgacccatcgcctcccaatcgtcggccgaggtacacgcttgcgagaacgtcttgcaacgactgagcgtccagggccagaagccggggatggatttcacgcgcgaacgcagggtcttttgggaggagaggtaggagacgagttcggcttgacggatggcgatatcccggtgagcttggtctagcacgagtgaatagagtgaggaaagcacgtccgtcagcaggtggcgaggtgggtacgacttgtggctggagcgggaaatgatgacagaaggctcacacttctggaggtcgtcgaggatgggaatgttatccttgttggacaaccagtcgttgacctgcgaggtgaagaggggttcctttagttcggtcattgtagcgagtgggtaggtagactgtagagtttggtccgttcgtggccactaagagatgttgccaagtagtagtagatacgagttgttgaacgtttatctgactagagatgacgtctcgaacgtacaaagttgcgagatacaacggacatccaatgatgataaatatgaagatgtccgtgatgtggggtcgatgtccgtgttttattacgtcatttcgcggacatcacccattgttctatctattcctgatgtccgctcgactcgggtctggaactttggtgattctcaagagttagcaacagggtaacagctagaagcgacatcatctcatgctcgtcaagaacgactgttgcaaatcctatcgaacgcattcacatctcgatctacgacccacagagtatcatcgcaacgaccaacactcatgtccgcaccagcaggcccgtccaacccttccctggtgaccggtcggatcagggataccgaccaggtcgccaacgctcaggggaaacgtaaagcagaggaagacgcagaagagcagaccggagaggcagtcaacaagaacaagaggtataggaaagataaacgtaggttcagccggttcacaggagcgtttgtgcggcagccgtggtaaccccgtgctaacatctcgccaccttgacaacacctttctcacctccatctctcccgctttcacaccgccctaccctcaaacgcctcaccggcaccgaacaaaaacagcatgggatacggacgatatcgatcattggaagatcgacccctttaccgaggaagataacaaatccggcccttttaccgaggaatcgagctttgccgtcttgttcccaaagtatagggaacagtatttgagagaatcttggggcgcggtcaccaaggtcttgggcaagcacgtgagccgtcgtgatcgtcctcctcgtcgtccttgagtcgaacgcaggctgatagacctttctcctccgactccgactccgtcttctactcgatctcgtcacccctacccggccgacccactagggcatcgcatgcaccctcgacctcctcacggggaccatgaccgtagcgaccacccgtaaaacattcgacccgtacatcatcctctcttcccgagatctcatcaaactcctcgcccgaggcgtttccctcccgcaagcggcgaaagtgctggaagatggcgtggcatgcgatgtgatcaagataggagggttggtcaggaataaagagaggttcgtgaagaggagacagaggttggtgggaccgggtgggagtacgctcaaggtgcgtttgcgttttcgccactcgactcgagcgacccgaggaatttgagaatttccccgccggacaaaaagctgatgacaagtccgctactttacccacgcggcgacggacgatgacaggccatcgagctcttgacaaactgttacatcctcgtccaagggaacacggtctcgtgcatgggggaatacaagggactcaaagaggtcaggaggatcgtactcgattgtatgaagaacgtgcacccgatctatcggataaaggtgggtcgtcgtcatcgtgcctggtggcccttgtcaagacggggaaaaggtcgaaggctgaaggctgatgttgatgctggacgtgcgtaggaattgatgatcaggagagaattggccaaagaccccaagctcgcgggggagagttgggataggtttttgccacgtaagtcggcggagccgctagcccagcgaggacgatcccactgaacacgagctctggtcacgcaactgcccgcagagttcaagaagcgcaacctgaaaacgtcggaaaagacggcgagaaagaaccggcaacaaggtacctcgggcgagtcgggcgcgttggccaaccagaccccgttgggcacggcgtccaagatgaccaacacggtcgtcgacccctcgatccccgcggcggcaaagtcatcgacgacgacgcagaagaaacagaaaaaggtctacacgccgttccctcccccacaacaacccagcaagttggacctccagctcgcgagtggagagtactttttgaaatcaaaagacaaggagaggatggagaggaaaaagaaggaacaggaggtgagtccccccggcgtcgtcgtcactagaagtgtcaggcaaggctgacccaatcacgtgctcgcttcgcagcaaaacgtcgtcaccgaggccaagagggctcagagggaagaggcgttcatcgccccagcggaaaaggcagggcagacgatcgaggagaggaaaaaggccaagaagagcaagaaggacaaggcgtaatgatcgacaagcggtcgaggagatgtatcatcgtagacatttgcggttggaggagagattggtctgtattccgatcatgctttctcgctcagtggctgggattcaggctttggtcgtgcacttgacccgcggtcccccctctggctcgtcttgatggcagtctgatcggtcccgccatggacaccttggaatgggatggtgcggctcgttctcggccgatcttcccccctggtttcatcttccgctttcgaaatatcaatatactatgtcgcaaccatgatatcgaaaatgtagctggacctcggaggtattgaaaggtggtctgcagacttggacgcggccaggtgcgggtttatgcagacgtcgccgtcgacgaacaggaccaggacgttcgatcttgtaggggtccgagctcggcaacctcacccggcagaacgtacagaaacgcggcagaccgaggtcgaagggagcttccgtatatgagtcacgcatagaatcatgtgcttctgccaatatccagaaatttcggtcagtaatcttgagcttgccatcacgataggcttcccgatctggaagtcgaggaaaatctgttcaagaacataagcaactcacttggaggaaggtcttgactcgagactgaggtatgcaggttgatatagtattgttctcgaaaggggtggagctggatcagaggcaaagctaaaacctcgatacaagcggtgtgttccttggtctcgcgtgtgcggcgatatcacgcgcagtatgaaacacggtctttaagtatctgatcacggtttagtctggcttttgtggccatgtataagatttgaactaatgggtcaagcgttcgggcctaatgtccgagttggaacccgggatggtcaacccgacattttttcggattcgagggatcaggcgaggcctcgtcatttcagtgagatgaggtgaggtactttgaagtgaggtgaagtgatggtgatgcgtgttgaatcatgtggagtgttttggaagtgatttatcagtgctgtccaaagggtgggtagggagggcaaggggatgctcgaacgtcttttgatcgttcagatggtcagtagtaccggcttgtatacgctcttagattatacatttcaatgcgacttgatcgatcactcgtcgaatggtctgtggctattgatagaggtcgacaagttcaatacttgaaagaccacgactcataatcaaggaaagaatattgtatactgccggtccatccagtagcctgtacaattcaagcgttcgtagcaatcgggggcaatggcctggcactgaatgtcgcttgccacgctgccatgattcggagcaacgtctgttcgccatgcttgcgaccgataaagaaagctccatacggcgtattatcactgagcaatccgacagggaccgatgctgcgatggggtttggcaaattatcagtcagtggtcgtcgggcctcgccctttcgcacacgacttaccgatgggatatccaaccatattagcggccgaatgatgaccctcgcggatcatgaacaaggcgtccaagtcgtactcgtccatgatcgcatcgagacctcgctttccagcgacaagcttcatctcggctttggccttggcgtactcgaccgaatcaaccttggcggcggacagacatcgcttgagaacctcttgtccgtgatgaccgggaggcatctcaatgtcggcatgctcctcgttgaaactgcacgcccgagtcagcacctagaatggtttctggcagcgattcgacatgtactcacgcgatgatatcggccaccgagcgacaaccaccctcgcctccgagattctgaaggtactttgtaagatactcgttgcagtcggcagctacaaccaagctcctcgacccgttcatacagttccacaaactgccatcgacggcagaaggaatattggccgggtcctgtacagtagctccttgtcccgacatgatctggatgacctgctcaaaggggtcggccagctcgggtacgaggaggtctcggccaggtcgttgccagggatcgatctcgtgccaattctatcgacgcaactgagatcagtccggtatcagggtgaatccgcggaagcaaaaggctcacctgccgagggatcccgatgcgcagtccttcaaaagtagggttctggcagctatcgatgtactaaagcatgtcgagaaagtcagccagagtagacaatacctgatagcgctggactcaccctgacgtttcgcgggatcctgtctacttcaagggctacaaagggaccgaggaccggtgagcaacaagcgacggacatgaactatctcgatcctgagctcactcttgtcgtcctcatcgtcacgtccttgcatgacatccatgaggatggccaagctctcaacatccttcgccatcggtcctggagtatcaaaataaggcgcgaacggaaccacgcctgaacgactgagcatacccacggtgggtttgagtccgtacaagcaggattgaaggcaaggaagagtgatcgagccgtctgcaaggcatggcatgtaagcacgaaagcaagaagataaatcataggcgagagaactcacctgtttcggttccgatcgaggccgggcagaaaccagcggcgacggcgacaccgttcccgctcgagctggtccctggggacgcatgtgctgcctgcaaacccagaaatccggtgatcagtctcaccgcccgctcttgccaccggatctcgcaccaaaactcacgtagacgttgatcgtctgtccaccgacagcgctccagccaggaccagcgtgcgcactcttgtagtcggccaactcgctcatgttcgccttggcgaggactgccgcgccaaaagatcagctcgagatcagcttcgaatctttgctagatcgagatggaggtgcactcactgatcgcacccgcctgacgcagtttctgaacgatgaatgcgtccttcttgacgggcatcccgagaagagcaaacgacccggcggtagtaggcatcccgagctcttcgttcgtggcgatgttatccctgtcaaggaagatctcagaacagggttagccccgatgtaaaggccgctacttgcctgagcaactcacttgacgacgataggaactccccaaagaggagtccgttcccagtcgacgattcccctcgcacggaactgatcgcactgactagcctcccgcaagacgctctccctatcacgcacccagcagagggccctcaatgtcgggttgtgcgcgttgatctgggtgaggtaagcctcgacgatctggacagaggacagggtgtgcgtctgcagaccccggatgatactggggatagtagccgtatacgggtcgagcttgtgtggggtctggttcagacatccggcggacgcgggagagggtgaatgggaaggggtgtgagtagggtggaggtgttggtatagcgtcaagtgtgggcgcgtgtcccggttcttggagtcccgtcgacggcgagaaggggaagacacgacccggtcggagaacaaggacggttcagtgtgaacctctttgacgctgacgtggaaggcatcctgagtcttctccttgtctcccttctcgatagaaggtcctttggcatcgactccagcatccgaatcgatgttgagcgaggtcgcgtatgcattcctgcctcgtcctcgtccgcgcaacatgccagggctgaagggccgggcattcgacccgccgctctgtccattcccgattcccaatccgagaggcaacgctgaccgatcgatcgaccgcgccctgttcctgctctgcgtcctggtcctagcctggccgtacgtcggggtatgaagttgagtcacattatgatgcggctgagaaaggccggcggatcgcgattgcgattgtgctccaggcggggtcgagatctgattcgaggcatgatgaccgctagtccagggtcgaacgtggagcgcggagagggatcgttgtctcctgtgccgaccaccagtctgaacctgaccgtgaccgtgaatcgggatctgggacggatcgtccatacgatgaccaccaaagccgtcatcccggtgcgagtgatattgaaattgagtctcaaacgaatgagggtcgaggacgacctcgtcgagcttcttatccaactccgcaatccaacctccctccgcttcctctttcagcactcgtgcctcgtccacgtttctcttcaggtcgacttcggtctggatgaccttgacctcggtctcgtcgccaccggccggacttgggggagcggtggaccatcctgaagatctcggactagttgcttctccgtcagtgtatgactctgactctgaaagcgtccggagctgggagtgggtgatcaggcccggaagttcttcgctggaagggatcgaagggagaggcgtgtggaacgcgtaatggtcgaatcggtagtctggctggtattcttgttgctgttcttgttggtggtcgaattgggtatcaagttcatcgtatccagtatgatcaatggaggcgtcgtcggatcgggataagaaggctcgtcttcctcgttctttctgatgctgttgctgataaggcgtttgggcttgggtttgcgggttgaggtagaggccgacggtcgccatagaacaacgaagctggtctctttcaaaatggtctgctaagtaaagtaaagtcgagagggaatcgaggtcgatggcaaggcgtcgatagggggcggtaggaggtcggcttgaacacgggatggttgaggcccggtattcgaggatctcctattgaggtctaggtcgtgtgagtgtgaggcgtttgaggtgatgctatggaattccgttcgagtgtgagttgcgagatttcgggtttaacaaatcagctggaagatactgaccgcgtgtatacgtatgagtgtttcctctatatatgtgtgggtggttgggttgttgggaggaaggatgagtgtacgaggcggtcgacgtcggctgattgtttatctctctctcgaggacaaggggggtgaagaggcgagataacgaaatatacttccgctcgatcatctcgctaagtcacgcgctgtcatggaagcgcacagatcgacggcgtggtaaagcacacggaagtaattgctgacacagggtccgtcgcgttgcgtgaggtctcggcgctcgaggcgaagctcaggggtcggccgaactgcttccgagcagtctttcccgggtagaaagatggctttcggcgagatcccgataaccggaatcgctgatcacgtgaggagcaaacgattctagattcgaagagatccttgtccgtgtttcagttgaaagccaatgtcgttatctcagctccgccttgtgacgcggctttggttgccgcaaagggtgaaacccctgatacatggcttcctttgtcatcgacgacgtcaaaacgatgacttgagttgcctgttgtcgactgaagggaaaccatggggttggacatctgcgtgaagccctagctgcaatgaaccttgacttctgtacctggatttcaagatctatctgcgtaaacgatagcataacgccagaatgactgctaggagagaagaaagattgagacctcgttcgagaagtcctcgcacttcgtcggggagcacagtgcccccgcagccctaccgagtgcaaaagcctcggacctcctgggatcgtgggttcccgatgtgtcttccccattgaaacagacgacgctcgcttttgagatagactacaggaaggtggaaactcaaggatcagtgtcgtctctaggcggctttattaaaaattcagccgcagatctcgagggtacagaaaataccgtcgaattggatgcagccggcaaggcgctcctcgaagcgctgatggaagaactgggatatggacaggaaggtgagacggaagatgtctcggaccagggtagcatagaggcgggcgaattgagcagtcaggaggtaaaggcttagtatgagtctttgtctggtgtaccgcgtgtcagccgtgatccgttttgaaccgggagactgcgataatagcaagaactgcctgaccaatgcaaagaaaagtccggcagcattgaaacgatgtatcgaatgcttcttaaaggtttgttcagagtcctggcagttccattctttcagactattcgaccacaattgctcgaatctcggccatgatcgggccacgaacgtgcctttgagtgttgacctgatgagttacaaaagtcccgtgatggctgatcccttgcttgtggaagcgaccgccgatcccctcggtctaaaggcggcaagggtgttacttgggtcaccagactaagatattaagatatcacattcacttcgacttcctttgtgtcacttcatttgattatgcagaattcaacggcgaatgtcgctctcttgccacccatcgaaaaatacatatatagacgggactataggttgtggaatgcgcaattattcgttgagcctgggttgcacgtctaaatgccaactcggattgcaagactttgacaaagatggcgcgcaccaaagcttcccttcaaggcaaattgggtaactcacagcaagcgaagtctcacgcaaaaaaaccctgcggagagttctctgacgtcccaaatcattcgatcgcggtcccggccgcggtcacaagcaatagggcaaatgtaacgacccgcgcaaaatgggccgaggagcagcaatctcgggccccgggaagtatgtcgggattgagtacagttactagtcaagaccagacgagcgagcgtgcaggccaatcgaatccgactgtctcttctcatagcgacttgcgcgagatgttgattgggcaaaagcctgctagtactgttagtgagcattcttcgacaatctcatggagagactccgttcaggggtaaggatatcgtgcctcagaaagcagtgcgggaacggactagaccagcaaggaggggaggtgaagagatccaagaccgctcgctgaaacagagctctgagtgcttcctcatgaagcttccactccatctgtaaggtactgcttgttccagtcgccgaaaagacgaaactactatttctgaggtacatgcctgggtgccacttatcgaattgttcatcattctgtgtaatctgccaagtctttgcatatcccacgcacccgctgcgtggggtacggctgcttaagaaaggtcgcccaaagcagatcgaagggcaggaacgtaccggttggcctttttcgattgattcgcagctacgaacgttgtgccagcatctccgatattcgggacggattgattgactgatccgagcgacacagataaatgcaaatcagccggcagctgctcagttcattttggtcgcgtgctggatatctctagtgcctccgttcagctacgcccttgacgtgttcgacgcggtccactaatttgtccgctttggacactacggcatatatgagtagagctcaaagatttccagacgagcaattcaatcaattctctacgatcaattctctacgaagtgttgtttcacacgtcaaaattgccgttcgatgatcttttagcgaaaattcgttcgactctgccttcaagtggtgaaggaaaggaacgtctaagtagggcggtctgagagcccaacgttgagtgatatgtggacggaaagtgttctcatcctgcagaaaaagtcaaaaagtgatacttcagaagaaagacagccgtcagcattctcaatacaagacaacgatcctgaattactcaacagacgtctttacgaacaatgacctgcctaaatacaaaggaccacaatgatgaattgataccaagtccaagtagctcggttgatacaaggacagctctagatgctcgagagtacctgcacttttacatcgatctttctccctcacagcactagtacagcatgatcttcagttaggtgacataaaggttatcgttggaagatcaagaaaaggttgtcgcccattggaggagggaaatgctccaggagcaatcccgacaactggaaatattcggattctaccaggtagatccactgaaaagaactttcctcgatttgcatgagcccatctccatcacgagcgcagctgttcacgagactggaaatacctatataagttctgctcacgatagtggaacgacggaggcacgaggttgggtccatatactagagagcactgatgacagcactccttactccttgatgtcttacatcatatcgtacgagtgcttgtaagaagcaatatattcgaaacgtgtaaatagccccgctacgggggagaaagatgtgttaccgtcttactggcactctaaatgtcgttttcttaccggcttagagctgcggcttcctcacgtgccgcttctctccgtatcaaaccacagcagtacatgtatgagaacgcccgatccagcattgaagtgagtgcagcaatgctaaagcaacaactgcttgaagattcgttcagtgatgccttgacgcaaaatgatgtattctaccctcttgatcgcgcgtgcggatttcggatttcattacagtgcgcatcggagagatcttctttgggtagctattccatcacagaccatttgtcctcaagcaagttgttgcaccagcgcctatagcagtcaagtcgaaagaccaccgtctctttccggacagacgtgacgtcgaaacgaagaagacaggattcaagctcgagaagggtcaattcactcgcaagcacctaacaagatcgcggcccacgacacttttacggtatctgcagttgatgtcctcaaaggagaacgcgacatggaaagatcttacgctaggcttgtcagtccatcttcgtgatcgttcctttcttgtctggtcttgcccttgtgatctcgcgggctaccgtgtagggaagaatggtcaatgactattgcgtcagtttttgtgaatatcaatattagatcacgcactctacaccatctctttctatgcgtagatcgaattttcctacccacttcacagttgtaaccatttctcaagggtcaacgaggtgaattgctctagcctcgacggatcttcgccatctggcactctacacacaaacacagtcacatcaaagaggtcaggtttgatatggagagcttctcggattttagctcaatagaaaaactccattccttgtcatcaggtgcttcgagcagccacaggacggctgctgctggagaaatgcgtgtagcgcggtcagatcagtcggcagactcgcaaggatacaacaaatcctccctctcggcgaaggagcagtatatatcaatcaaggataccatgctggaggggttgtcccttccaagcagaaaaagggtcatcgatgcaagaaataggtgccgaagagggatttcaccgctgccgaggggtatctctagtcttaatcgcttaggtgagaggagggatactcgtgcgagtatcagatcgaaatcgcaagtttggaatacttcacaagcacgtcccgatggatcgcgtcggctcgtgaaggaagcgactcggaaagcatgacagtcgtcaaacactagaggcagaacgtcagtggattcacctgtatcatcaagcgatatgtacttcttagagggttctgaggaactcaaaaaagcgagatcggcgtattacgagcttagccccgagaggctattggagggatgagctcgattactgtgtctctatcagcaacgaggagaatgaagaagagatcgcatatggagatgacgagaccagaaccgagcacaatattgtcggctctgatcgggtcgtatcgcaagccatctctcctgaaaccgatttcaacccttcttacaataggtattgactgacatgaaggtctttatgggccagcagaaatttaagattggtgcaatggataaatacactcgagcagacatacgagtactcagaagttcggatacaagttcatctcccgtagtttcgatcgatgcatcgccttccttcctgaaaacccagggttgcgagtcatgtcattgcatgaaaactcctttcatacggtcgtcatgcgatttcattcgtcttggaagaccagtgtagcctcaaatagaccagggggaaacacaagaccacctagatcgcactccaggccctcactagcgcagactcgcatattgatttggcgacctctagaaaatagacaagagccatactcacatcttcgaaatctctcttgcacaaagaccttctggagcgaaatctacggtctctctgacagtcggtcttcgtggcagaatggtcaatgctccgcaacacacgaccactgccacgccccacatcgattaatcttccaacacgagcgcgacctattctgcgtcagccggcagcattcaccagagcaatacagcccattgccaagttgacatcggtacattacatagttcagggagaggcagtaagcggccattggacgatgacggtgacgaatccatgaaagacgttcccgagtccgctcagaacgatttcccagactctttcggttctgcggctgggtcggttcgagctgcggatcaaaatcaggatgccagaaagacctgttgtgtgtccactgacccagaagaacgatcgaggagacgaaagaaagcccgaaacagcaggcatgtcgactcaagtagcatttcgaacggaaccgatatctcgagtataccttgcgagcatgatggtcgtgtcgtcgccgtcccaggcaagcagccacctactcatgaggatgtctcggcagacttcgactttactagagtcccggatgtcgaggaaaaaggatttctgaaaattctggttgagctctgtacatcgtgcttctattggccaagattgatcacaatcctatacttggtcatgacgaaaaagcagaaaggctctgacagtagcttttctccgaatgaaggcccttcgagcttgctgcgcatgatcgagatagtgcgaatcgcgaacgagatgaagatcgtcccatttcatttggcacaggacgtaatagtagttgggaccagcttgtctcatttgtccaggagatatgacttctcgctcccgacaaccgcatcatagtctgccggacacgcatcggtaccatactgaagccatcatgggcctgtaagaggatccgagccgactatgaccgtactactggtacatttgagcttacaagaaggcaactaaggaagatccagggccgaatgctatagaaagctgagcggcgtctgctgctgtgcataaccagtggaaacagtcgaaaagtacaacggtcattagacgagcccctaataaacctcaaatgaaaagcgtattatctcatcagaagcttatagtgtcgtctggtcagatcatgattcagctttcgaatgcaagtcgtgacgatatgcttcgagcttgtcagcccttcttcgacccatcggcctgaaacaatagaatggccaacagccgtcatgtctaaggtgcgccagggctatcgttgtcccggcacactgatcgggtatctgccctcttagagagtacataaagctttgcgaaaaatgggtcaactgacaagaacggtccgggatatgcgtatatggcttgaagcgttggtgaagatctgtaaacgatccaacttcttgagctggggtaacgtgcttctccgaaatcacaggggatgccgaaaggactcggtccctggcctgcaagaatttacaaggccgcttcgcgaggtgatgaagaaaggttttagtcgggaaccgggaccagcccaactccgggtatgattgacctcgacgagtaatctaagatttcagctcgtctggaaaccttgcttcttcgggtacacgagataaaggatgactcgtattcgggttgacgaatctgcctcaaggtccggctgtatataggcaaagagggcgaatggtcagctttcaaaacgcgaacaggtctgaatgccatgttactcaggtggcttataacaataaaatatagacatcgatgtcagaaagggtctctttagcaatcccgcgtatgtcgacagcagctcaagcagcgttccgtgcggatatcgatcaagcgcgagaaactcactctctcctcgggagggcagtgccgaatgacgcaagcgctggacgatcctcttggcttcgcttcttacatgatcagagaccagtcgcactagtgcaagccatcgtagcgaggcgcacctccgaccccgtgtcttctcttcgcgaggtggaatataacctcaagcgatcagttctggtcctgtctgatgatgagctacaggagacaaggtgtctctaagaagaacggacgaactcaaccgcgaagagatcaaacggtatgagctgattaaagcgctgtatgtcgccgagtatgatgaacaatcgcggctgaaggatctacagagagctcgccaagccctcaacgagatggaccttcccgtgtttttgacaccgtaagttgctcagtgcgtcaaaccgattggtgtggatggtatagctgattgccgcgtttaccaagaatacaggataagattgtcttctccggaccaacattcgtcaccttcatcgctttctgtgcaaatgtccgacgagcctcccgacctctcgtcaattcctgaagagagttcggagccacgggtatatcaccgtgaaagggactatagaccacgtacccccatgacctctcctatctcagatgactggggaacaagctatgcgggtggaaacgattttgatcacgaagaaatcgcatcactcaggtcaaggcgaataacctcctattctcggcaaagccaccacggtacggcgtttcttgatcgcattcgtgggaacacgcttaagtaattgtttttactgtggaagccgttgggtctcattcgccgtcggtatttccgggggacaatcgaacttcaacagaacgtatgcaccgggagtcgcggttcacgcttagcagctcatcgtcggcgaatcgtgactcccgtaccgatagcgcgaggctccgctatcgaaccatacaggctccgcgaaatgtgtctcctgctactggcaggatgctcttgcgtatgcacggggagagaaccgccgaaggatttctttcggtcacagtctcaaatggccagtctggccagtcgcaatcctccaactacgatgatggcgaccatgagacctgcagctactactatcatcacgcgtctagcacagaaacacgtacacgtcacccgtagtctgccgtttcggacagcttcacaaggtcggatcagcgcttagtatagcttcggtggcgtgtaccatgttcaaagctcgacagctcgagattctgtttcggcgctcaccgaatttagtgtgaggaggcggagtcttttggtatgccctacagtgtcgacatcctcttcacgatataccaaagacatgttcataaagtcatcgaagatgtcggtcatttcgcttgcaaggagcggacatgcttgtagacggtctcgctcgtgacgactctcgctgtaccaattagaccaaaagaggcaaaaaggcgcaagcagtatcatgttccatcggagctgttgcgaggcacggaacgcccctggatggccctgctatcttgctgtgatcaaagacagtcacctgtactatacgtatacatctttgcgaagcgtactcgagtagtcgacttcatgcaataccggggtgctaatatgcaacaccatttctcaccaattacgtattctcagttaactcaagaaggatacatacgtgcatcgaatgaagcatcatgtgagtaatcgtattccgcgacgttgcgatagatattgcatttcgagctccctgctcgggcaacggacgtttgttttttacacctttgcgctgacataagacgagacctagagtctccacatggtatgcgggcgtaccgacacatctgggttcactcgtatctctcgggcgaagcatttctcaagattactgcgatagatcgcgatgtcaagtcagtaaggaggtgatcaaggtcctcagggttcctatcatgacatcagaacgccaagtgccatttacacagccaccatgtgctttcgaattttccaatatcctccagatgggcgcatctgtcagtgctcgtaggaatccaaagggacggccgattgcctttcggaaggagattggcaatccggacgtaagcttcaaaggaactcgcgtattggtatacaagatacgacattggccagtgagccagtgagcggtgggcacgaggacattgccgatcatagaacaaagggggccctgtcagctgatttgtagcactttgattatggcaatgcgacaccatattatatcatgttgtaatctcaaatcggcgaatcagtctaaaagaaccagagcgtggaaaggctcacagtgggattagtttgccaagaagtttccctcccctacccaatcttctacacgtgtcgtcatgcccaatctcaagcgattgtattctctcgagcgagcgaaacttttgaaagccatcgacaaagccaaaagggagcacaagcgaaatgaaagaggccagtcgccttcatgggttctccgtttaccttacaacgagcaagttgctgaagtccgagacgtgctctcaaagcgcgattcgtccggtgacataccttggaaagcgctcgaacggaacctagaaaaggtttccctggtactctctgtggaggaacgagatctttaccaccatctcatgttcggtctcatcaccaacaaggaagaattcgaatgccttgaatcactttacgaagccgaggataagacctccgggcgctcgaaggaacatatcgaagagcttcaaacgctgcgcaaagcgcttgacgaggcatcgcgagcgaccacgcctccccagagtgttgtcagtttcccaagtgccaactcgttatttgaccacgaaagacctgggaattcagtcatcctaagtccggaggatcctcgtcgtcataccaatcacctagacgcctgtgacaaagagaaggtaccagatccgacctgtgagtaatgacaacagggtagcacaggtacccgacgctagcttcccaccaacctacttgtagatcgccgttgccacgcaggtagccaatcaccggatctagcattcacgtcaagccgtgtcgatcgcacctacgacggtccatatgaaggctacacgcactcagtctttcagccgggccattcttatgaacggactttcacccatttccacgaacgacagagtcttgcctcggatgccgtcggcgcttctaccacaattcactatgcacatcctagcactgtcatacagccacagaacacttttccaccgcgaggtgacccatactacgacccacggataccgtccaactctccgtcctccggacatcctggcactagaccatactggtacagcgcgaggggaccagacgcagatcgatatgatcagtagggaaaacctcgtaaggtttgcatgggatacattcttgaatcaaagacaagacggtctgtaacccacagccaattgatcgggaatgatgatactctgtatccgaatctgaacaagtctatgggaaatcgatcaatcgggatacagcttgcctgtaaacagagagagaccgcgtcagtgtaactgtctcttttccaggcattataacactgcggccatacacatacctggattgagaattcccttgggatccatcgcgttcttcaaacgtttcatcacttcgaccgtgccatctccgagttcccgtcgcagatagccctgaaacggtatagcaacttgagcttgctgaaatttgcaacacgcggtacgttttggctcaccttctttcctacaccgacaccatgttcccctgcagattcccacaatcgaatcagcctttatcaatagaagcgccgtttgaaccgcgactgacctgtacacgttccacccagagcgatcgcccgatctaccattcggtgggccgcggcatcgaccttttcaaagtctttcggcaggaagatcaatccgcagtggaaattgccgtcgccgacgtgtctagacggaattccaagatgagctcgagtgcacacgcgatgatgatcacgctgctcggtgctcacccaagtaatggtccgacgatatcgttggctttcaggtccgcctgcgtctcggcgcagagctgtggcagttttgagaccggcacgcagacgtctgcaatgaaaagttgggtcaggcttctgggtcactggaatgcaaacccgtcactcgtttgtactcaccagtcgagtacgcctgtccaccctcgaccaacgccaacatgctccaatgcgcgttctttctgatcgaccatagctctttcgattcttcctcgtccttggcaaagatcatctcgctacctccgtgctttttggcgatagccttggtgagctcttgagcttctttcatggcttgcgggttgccttggaatttgaaaaagatcgagtcttggtccggcaaggttagggtcaggccctgaagtcgcatcgagttgtcagtccggaagtcaatcgcccttaaatcgagttaaggcctacaccatgatccctcaaagccttcatcgtcaaggtgtcacacagctcgacgcattctgccagtaccaccgatgttgttcgcgattagctgtgtgtatggcttttgaatttacatgccagtactcacggatggggacccccgaattgatcacctcgcccacagccttgacggcgtgttctacactagggaacccagcgatggctacagcagtaggcaagagcggggccagccggatcgtcgctatcggtccgggtccaagcgaactccctcatcagcgattgccgaacgggtcatggagcagaggtcatctgtacgtttgcgactgaccttcggtgatgatccccaaggttccctcggcaccgacgaacatcttggtcaggtcgaacccggccgacgatttcctgcgagaagtttgtcaggcatcgtcagtgacaggaatgagcgaggaggatgagtgtcccggggtggaatcgacgctgacctggcccgctgtcgagtcttgataacctctccatcggccaagaccgccgtctacccctcgcaaatgcccccgatcagcttccccatcccgaaatctccccaccctgcacaccgaccgcctcgcccgactcacgacattcaacacccactctcccctcgccgtcccataccgacaagcgttcgtcccgctacaccccgtcccgatcatcccaccgatggtcgcccccggacctgggtccagagggaagaagagcgggtgggagagcgaggcgaggtgggagttgatctcttcccaggggacaccggattggacgatcatgtccgagtcttccactacggagtcggggtgacatgattgatagcgagatcgaggtgggttccgagtcgtagtgaggacggtagttgatgcagcaagacagggacgatgccagtaaatcaaacgggaagacgaatgacgacgaccagtcaacccggactctgttttgtcatcacgatcaaacgacttgacaggagggctcacggttcaattgcaagatcttgtccatcctgctcagatcgatacagatcccgccgaacggggcggtgatatgaccttcgaggctcgtccctcctaatcactcgcgagtggtttcgaaagcaggttcagggagacgaggatggaggtgaagatgacgatggtagatgataggtataggtaggcggtgagagagaaaggaaaacattcaagaggaatcagcccagtcccgttgaccactaccactaccacgaccaccaccgccaaaccctgcagactcaccgctataaggcacgacaggcaccctccactccccggcgaccttgacgaccttgacgacatcctccgtgctctccacatagacgaccacatccggggtatgaggatgatgatgtgtgccccccgcctgggcatgtgagagcctttcgtcctcgcccgtgcttatctgggaagaaggcaggatgcggcggagctgggtgatagcggattggacctcggaggcggaggcgtaatggggggtcgacatggtgtccggtgaagaggagacgggctgggggtcggacagaggggaggtggacgtgctggcatcggaatagtgaccgacggcggtagagtcggtatcggcatagaccgtcgggtggagcaaaacggtcgaggtggtgtacgctgtcgcgcctaccaatcccaaagctaggagagcgagacgaggtcgactgatcgtgagcgtcgacgatggggtcgaggctggtcgggtggtcaggggtcgagatcggagttgggtcgagcatcgtcggagaagagatgtaggtcgggctcgagcggtggaccacatggttgcggtgtgtagggggggggttgtaggtcgtcgatattgacaggaacgtggttatgatcagatgtgaggtctgagctctttggatacgactggcgcgacttgacccctatgttctccctgctcgctgctcatcaatctgtttcatgtttcctcctttgatgccatcatttccatcatatccactctttgatgggcaactctctcgggtgccggcgatgtcgtgatgaatcgggacattccggtccggggctgttgtcgtgagatgacggcattcgatggcgaaccgttcggtgaattcagtgttggctgttcggcgcgagcccaacagcccacagccgctcgcgtaaaagagagtcttggcaaaggctgacgccgtgcaaaaccaccaccttatcgtcaatgccggcatatatgccgtgatgataccgtactaattatagaaggaaatcgactttcctctccctcccacgcctgtttgcgctgtttgtttggctgacgattgacaagtttcgcactttcaacagaacctttgaacgggggattccagagattcacagggacatccagatcagaacatcatcatcgacatggtcaattagccacactcgccacatccacactctgcgaggacacacccccgagtctcgtcacgatacttacggatcgacacgctcaccctggaaagaccccgacggctagacgtgtgtgaccttttcctttcttcttggaacgggccgactaccgcctacgcccccgccatcaaagattaaactcgagatcgcctcgtccgtcacactcacgataacccatctggatatcgacggtcgacaatctacaaggcgtctagtacatcaagctaagaagcggttgatacgtaccaccattcaaacagtcctgctcggcaaccgtcctgaacttcggattcaattctcgaccggtacatacagcactctacaggtggatcgcactctagtttaaaatattcttgttcaaagtgatcgaccgacgatcagctatcggactatcggactacatacagtagtgttgagacgacttttacctcggggttcgaccttcgaccgtgatcacgacgatcgaccccgtccctcgcaactaccatcactatcgatcggcaaaattgaaagaggatctatcaacccgatagatagctcttcctgtcattctcagggcttgaaattggatcacgtactcaacttatcaagctcccacaccttcgactcgactcgactcgataacaactaccccaggctacagtacatcacagtacataaaaggactttcaagatcgaccgtctacgagcttagaacgttcgcgagaacacctcgacttgacctcgacctccggcacggtcacgagcacgagcaacaagcacgaggttggatacgcagggaatagacatagcatccacgacgacgacgaggaggatcgccgaatagacatagacgaacacacgaacacgtgggaagaaaagaaaagaacaagaataagggatggctttccatccgttcgaggtcaacgtgccccatctggcttatgcgtttttgggaggattcgtcgtcatcgtgagtcgagcgttgtcggtcggtcgcgtcgttggttggatcggctcggctggagaggtcgaggtcgggtcgtcggtcgggaaggcaggggaaatggagtgggccgaagggataggatcgaggacaggagagaatatacggggagggaaggtcggatggggatggcgtggggcgagtttacgtaagattcaggcttcagggttcaggattagaagccagaagcagccaagggattgggctggagctcgggactcgaggtatcaacttgtcaactggaaagaacgctgacctcttgatctcctctcgtctcttgcctttgctccccatctcttgacccggatacccacgatcgacacgaaacccccacgccccgacccatagttcggactcttctcgctgttcatcaaagagaggctatacgtcggcgaggccgtcatctcgacagtcgtcgggatcgctgtcggtgagcaatcgaccgatctcgcccagggccgccgagtctcgggggcgcttgagagggggaacggcgctgacggtcacttcatgccctttattctttgctcgtttgtggtcgaaatggctgcgtctggaacaacctggaatcctccgcaccggacctgtttgcccgccccccgtaggaccctacgcgatcgggctgttgaacccacaccattggggaggcgaacacgaattgaacaatgagacggtcaatgagatcaccctcgaggtcaccagggtggtcatcgccattggcgtgttcgctatcggtgtcgaattacccaaggtcagtaccgcagaatcccatgacaggctgcaaatcgccagtgggctgacccacgagtatcgccgtacaggcttatttgaagaaacattggaaatcgttggccatgctcttgggacccggaatggttgtgagtaggcgagcatcattcgccacacaaccggcctcaaactcatccgaactcgcgcgcgacatgacagtggggatggctcgtctcggccctgttcatctgggccatctttcctaagatcgaattcctctcggccctcgccatcgctgcttgtgtcacaccgaccgatccgatcttggcacaggccgtcgtcggtggtaaattcgccgacaaacacgtcccggctcatattcggcatttattgcaggcagagtccgggtcgaacgatggaggtgggtcccggttttcacactcgtccgggtgtcgctttatggttgaccggagtgctttccctactttcagctgcctttccctttctctgtgagctattgggatgacgagttgcttgtcgccgttcgtccgactgatccacctgaaacggctttgcttagacctggcgctctacttgatcatcgataatgacgaccgacacgccgtcggtgaatggttctacatcacctggctttatgaagtcgccctcggaatcaccatcggaacgttgatcggttataccgttcgcaaagtcatgaaattttccgaacggaaaggtctgatcgacaggcagagtttcgtcgctcaatacgtcagtttggccgtcttgaccatcggtaagtgcttggttgtttgcagtgctagcgggcaggacatgccgttgattgtggctcgcaatgtttcaaggtatctgcacgcttctcggaagtgacgatttgctcgccgcctttgcctgtggaagcgcgttcgcttgggagtaagtgctgccctttcggagggtcgatccgtgaatcattcaagctgacgacggcggaccccttttgcagcggtttcttcaacaaggctacggaagacagcatgttttccaacgtcatcgacttgttgttcaattgcgcctgtttcatctatatcggcatggttatcccgttctctgattggaataatgccgccacgtcggtgagtgcgatcgtacagagtcaatattttcgtattgcagtgtctgacgacaccgtggacgcccggtagatcaccgtttggaggctgttcttgctcgccatcgccatcctactgctccgacgactaccgttcatgctcgtcgcataccgctggatcccggatatcaaaacgttccgggaagctgcgtttaccggttggtttggaccgatgggagtcggagccgtctttatcgccacgctcgccaggaccaagttgcccgaaccgcacgaggaaggaccgatcggccaggcggagatcctgagcgccaccatccagcccatcgtctttttcctcgtcttgatctcggtcttgtgtcgtgagttccggccggtcaatgctcacgcaacccttcctgactcacgtgcgattctgcagacggactttccatccccttcttctcgctgaccaagcgggtccattctatctctcgaacctggtcgaggcaatccatgggcgatgagcccgcgtggtcttctcatgctcgccgtatccagccgggcgagtctatcagggtcaaccgtgacgacgatgatgacagggaagacggtgccggtctcgacgacggcacgactgatcgaggcggcgggatggccgagaagcgacggtcatccagcgacatggcaccgaccgatacgaccgactctggcacgaccttggctggagaccgacaatacaatgaaaaggctggagagcgggccgatgtcgatcagatggagaggggagaatacaagggtggcgacgaggaaaagacgggcgatacgcgggacgatgccaggatgcgcgaagaggacggcagggagacgcctatccttgccgagtaccgcgagggtaaccatctcgttcgagaacgtttgagggatgggcaggacgaggtccacgtcgaggtcatcaaggactatttccacgacgggaagccttcggagaagagcagcttttggcacccgcagccattgcgacgacacgaggtcgacaggctacacgagcacgtggtcgaaggcgctgaacatgcggctagtaccgtcaaggatggtggcgaggggcaagaagatccgctcggtcgtgagtttacgtcgggggtcgatgggttcctgctaccgttctgattgatcgctgcttttcctttgcagtcggcctgatgggacccaaggcacgacgagagtcccgacgcgaggaagaggaaaaggaggaggataacaagaaacgagaggcggccctcgaaggagcgagtcacgagcagcaggaagaagctgcaagcgaggccagacggacgaatagccgacggcacgagaaagaggcacgacgagactcgactaacccgacagtcgcggagcaggacgagaacgaggacgatgatgggttcgtcgatgtcgaggaaccggaggagcaccattcgaccggacgacgggcgagcgcatctcagggcagaccgcgggccaaggcgtcttcatcgaaaccgtccaccattttcatccactcgaggccggtcggcagacgaagagaatcggtcaggcagcaagtctttggagggaacccgggtggaagacagagtcgatcggggtcggtgagcgatccgaaccttctcgccccgccttctccctcgggtgtcggacgtcgaggacgaccgatcttgaacgccagtagggaaggctcggcggtcaactcgctgcggaataccccttcgagagacgtctctcccgccagtcgatcgagggggctgaggttcgcggaaggtacggccgagagtagccagacggcaccgggacctagcttttataaacgaccggccacgcataacccagacttggctatcacacgaacggcaagcgtgcagagtaacggggctggtgaagacgccgcgtcgaccgggccactgaaaggacagacttattacaacaatcgacctggatcgggttcgggattgcaaatgtacaagtcgaggagtatacagagcaacggtggtggtgagagtgaaggggaaggcgggaagggtgggttcttgagtcgtttgaagcgacgatcagggcagtagagcgagtacgacgaagaatagcgtagcataagcatgtccagtgtatcaaacatgacgatcgatgtggctttctctgtttaaaaatgttgacgactggcaagctacattattacttggactgtcgaccatcatatagctgccatccgtttggttgagctgagacttttcgtcaacctcgcgtggttttctccagctcgaagcaggtcaacgtctacaagtttagatcgatcaacttgagaatcgtcttgtatagtcggtagacccatacccttattcagcgacccctgaaccccccaactagcagtcatgccacccatctcgttatcatcactacgactggctctgccgaccatcgcccgcgcgccagcgatctcccgacgaacactggcgtcggtagccgactacgacccttccaaggaatcgaccctgccaaaggctgttcgggaaagacgagcaaagttcccatcgaccgctactatccagggacaattcaccccggcccaggaggttcgattccagactctccgtgcagagggagagttggaaggtgatgagatcgaggcgagacagaggttcttggatgaacacgagctatggaggagtcgggtgcgaggtcatcgtcaggtcaagacgatgcctagggacgattcagcagtggatcagaacgtggacaacctctcttcccctggacgtctcgtacgattcagcgacccgcacgtccaaccctcggcagaacatctcgtcgcccagcggatctacctacccaacatccagatcagactgatgaggaaccatacccaggccgggcaaaagtacgatccctacgtcgccacgttcaggatcccgcctagcatgaccaagacggacctcaggtcgtacctcttggcagtgtacggcctacacgtcacgttcatcaggaccgacaactatatcgcccccgtcgcgagggtcggcacggatttccaacaaaagcgcatcaagggcagtcagaagaattacaaacgtgccgtcgtcgggttacacgagccgttccactacccggacgacatggccgagttggacgccctcctctctcaacccgcaccgacgagccgtacgcacccggacctcgaacctgccgagctggaagcgttaaaggaggaaatcgagctccgacgatccaaagcagaggaaggcaagaagagcagagagaaatggttgaacgaggtttacatggtcgaggcgcaaaagaacggaaggaagaggagtctgatgaagatggccaagggatggaggtggagaacgcagacgcacgacaacaaggtgtgtatcgtcggctttcgtccagcgaggatgccgaccgttgactgttgtggctctgacgctttgataggggaacatcgtcagggagatcatgaagcgacgagccgagcgggagggagccattgccgaagccgttcaggccatgtagatgcgatccagcttggatatttgtgcacaataccgtacgatgtaacgatgatgacgacggatctttgcgacgagatcaaggggatgtatccgtttgcgtggtggcggtgggaatgtcctatcaccaattgaatgactacatcgcctcacttcgaggttgtctacatcaagaaggaaaaatggatacctgaggacagttgtgatggttcagaactttgctctcagcattcgctatcccgggcaagctgtgtcaagatcacctaagcgattcaacagctcgggcccatcgcgccaccccgaagctattcgaatcgacgctggatcgaacagccgagcaattggatttaccataattgtctctggtctatggattttgcaattcccatgcacccaagtaccccactacgggatcgccctcaaggagtcggctgagactgatcgaaacccgataccagtgcggtctatacatcgtgaagaatgcgatggtcgtataacactggtgggtattgcacaaacccaccacatcccagcaggtcttggccttgttcagtctcttgaactcccctgacaacaggaaacacgtgccggaccgcaggtggtgagcctatatcatttctgcggctccctactctctgcagcgcatgggacccataacaatggctacagcgcaggaggcatcacccggcctggccctagatccgagtctgttttcatcatctggttcagatccatctaccgacagcgtcacgacgatttctttccttgcgggttgctgggtcgattatttctaaaccgtctttatacgataataattaatgatgacaactgcgatatgatacgtttgattcaaggacgccgatcgaagtcttgcgtgtctttgcggatcgaggaaggtcaccccggcgaaagtatctgaaactcggcgcttgcgactacatcgctcctgcgtgtacgcgaaatattgtccgtgctgaggtaccattgcggtagcacgaaacaactgaatgacgagctcgaagcacgggcctggtgtcgtgcgttcatggcggccttgcctttggtctatcaagtctatcaagaaagtggaacggtctacatgctgctggtggaggtcggattagaaaaggtctgccgggagggcctacgtctcgcggtgagtctaggggtggtcgtgccatctttgggggtttccatgctgatcaatcatacataggtctatgatcaggtctttcacgattttaccctagacctccacgtcatactgtcgggctatacgttctcagtactcaagacatactgacggcagtcgaagcagcagaagccagtaaatgacgatgaagatgtcgagtttcggattgtcgagcgctctacaccaatctgcacgcggcgtagagctacgtgtgcaatccgctggctgtccaaatcggaggcctcttggctaaggtttaaggcctgttggttgagattcgagaccttttggttgaccttgcggatccgggcctagcgctcagagatcttggcgtcaatctcatctacctggctggcggggacggcgaggatcagaagcgaggtggccgtggtcttgacggtcggggtaacgaccttgacgagaagcgagagcgagacggccccggtgatggtcgtgacgacctgagacctcgagcccacagcggccggggtcatggcgacagcaagggggacgacagcgacggtgagaggagcagctgtggtggttacggcaggtgcaaacccgacgggcttgacatgtgccgtgcttcaacgcgatgcatgcgggactgttcggagcgatccatctatccctctacggcactctcccctcgatctgcaaagagggaaaagcgatgccccagatatcaatgtgaccttgccgcccatgctgcctgggcgagggatgtgtgggagggctgcaaggactactgaggctgctgagagtgcaagggctgcgacagtggcgaaggaattgagacatcagttggaggaggccgagactgatgatgaggtgggcaggtgcaaggatcaaggtgaaagaggtttggcgatgaatctattgctcatacctcatacacaacactgcggcaaatcggggttgtacacaaacatgcaccggttgcttgatctagtgatcaagaagtgattcgccctggtcgtcgtcatcatggcttgggcgcagaacacttggcagtgaaactcttttcatctcagcgcgtcaccgagccggtcgtcgggatatagcggagggtatatacaaacctgtcaacatgttcagaacaggaatcggaatttacaaaaaaaagctttgggcagaggaccccgtctaggctttcgagcgcagacggtaggcagagaccttgtcccaatcgatccgggttctggtgatcggtagcgcacgtcgaagtctagttggggggacatgagaaaacaaatcagcacagttctcctacgtttgcgcaacgtgcatcgcagggacctacgatctgaactccttgtccccgaattgctggttggtctcgctcaacttgagctggtactcggcttctagcttggcgatcccgttgaggatcttgctagcccggtcagcgtctgcaggaggtaacggtaggtcgaacgattgcgaagtagacagttggacctgtggcaggatggaatgcgcagatgttaaaggatgatgcgaaggagagggtttcgagctcgacttacgtttccagcttcaaagtagtgaacgtcgacgtgtacctcgccgtgcagcttctcctccttgacattgacagtccaaacggaacgccatcttcccgtcctaccaagcgaaagatccgccttagtcagaaggcactcacaaacgatcaaatacccgattgcgagctcaccagaaattgttggtattgtacttgttaccgacgatgcagacggtataaaccgggtcttcctgcaggtcctcttcctcctcgtgcgcctcgttgacctctaagctcgccgtcttgtcttctttgacgacatcttgctccgcggggacctcaccggcgatctccccagcctcccgggtcccgaccgcagctacgggcacatcggcggacaagacctccttgacgctttccacggtctctgccatggcggtctccgcagcggcgatgatccccgtagagctgggctctgcaggctcgctactggtctcgccggtcgattcgacggcagggtcattcggtgcagaaacggattcagcggggtcgaccgtcttgtcgacctctggctcgtcaccagaaacggcggctttgtccacagtatcagaaagtccagtagtagccatatctacaggtttttcaccctcgatcgattcttctgcgacgggtaccgcgatagtctcctcggtccgagcggtctcggcaggccgtacgacatcctccgtcttcttctccgccttgaccgccttttgagcgataggcttggccgtgctgaacactgtccctacggaatcggacgtcgagtagtggttaccaagataagaagagagggcggtttggagctcggatctggtggtgtatcgattggcactcggtcagtcagacgtccggggccatgaagacggagggaccggatgggaagcggacggggagctcaccggaaggtctcgaaatctggtttgatctcgtgaggctgctcatccgaggtctcctgtacgtatgaaaagctgtgatcagcgcgatgttaagaaaagggaaaggtattcgacggacgagcgtgaaatgatccagcttgaaggatcgcttggattgcgggtcgacgtaacggtcagtgtccgaggacacggtcgaggcttccgagatcagggtctagaaacattgagggaattcaaatgatcagattcaatctggacacggccatggcctgactgaagagaagaggagggaaagtatggcaagacgtaccggggaagcagctccggtgagggtcacgctctgcaactgggcgcgatgatactcccgtagcctcagcaagacctgctgtttgaactcgtccgagttgtcatcaacgatgatttgaatggctgcaggtgtttggatagccggtcgtcagcattcggcacggacaatatggcacgatggggacttgccagcgatcacgtcgttgacctggccagggggagattgggtgatgagttgggtagcgaggtcgtacctctcggcaggcgacagctgttcagacatggcgagcgaggcgtcggcgggtacttcaaagctgtctctagaacgatgatatagtaggtagagtgagcagagtcggaggtgaatgccacacccgtgtgttgcacgataatggtcgatcatgatgatggatgttccgaatcgacttgcgacttggacgctccagctgatgacgcggacaattccgtaaagtcgtttcaaaagagaaacacgaccaactaccactttctccgaaaatacatagcatgtcatgtcacgccagatcacaccgcagtcatgacaagatctttcacctcctctgcagctccccaacaagcttgccagcccgcacccccatgtccataattgtaaaacaccttgacggcctcaccctcgttgccaacgacgtcccgcacgtctagacctcgtcctaccctcggtccggcttgacgggagggtcgatggccgacaatgacatcctctacgagcgtctccagtagggcgaacttgtcttcaagtggcgaagaagcgggtagtggtgaggtcgggtgtgaagcgagcatagcaggatagatctcgagcgcgcgcaggagaatatccctggtcgtctccgggtccggagtggcatccctatattgaccacgacgaagataccccgggaaatcagctcgaacctccctcatggacaaaccggtcgagcagacttgccattcgtcgacatcccgagttccaccgaggatgacctctccgttccccctagggatcacgtacgtcctcttccccccctcgccaccgttcaacgaacctacctgcctcgtccacccggtcttgacccacggagcccggactttgacgacctgcccccgggtggggaagacggacttgtcttccagcccagggagagaggacgcgcccagcccgatacacaggatcaggtaggtgactttccctagcgagagtgagctggtcaacgaggagaagccactcgaggaaagggaggcgagttgcgccgtgtggatcttgccgccgagagcaaggaaccgggtggtaagccgagagaggtaaatagacggcgtcatggtgatcgaccggaaagacaccgagtgcgtagcaaactcaggaagttccgagctaggcgtgatccggaactattgggtcgggctcggggtcatgacgagacctcgttcgtagcagacttgaagatgctcacatcggggtacgattcgaggaacttcaggtgtttctcttgaccgtcaaagtactcggtctgtcgtagagacatcaacccggtcgatcccccctcatcgtcgtccagttcccgctgcatcacctcgaaagctgcaccccccgccgcgtccatcccatcagcctcaaattccatcgagatggggataggggttacccggactgctcactctgacgatcccaacgagcttgacgagcgtcgtcgtccgcagcgaaactgagatgatgagctcccgcacacgtactggcgtattccggatgagaagcgtccgaggggaacctcgaggcgatgatatggaccggggtagacgggctggactcgagcagacggatcgcggtcgtcagcccgatgatcccgctaccgatcacgagggcggacatggtggaacaaggatgtggtggtttcgagctgctggctgagtggtctatgtcgttgagcttggttcgatgggaggtgacgagtgaggggagcaaatgtcgatacagtcgatgtcacaatcaaactttatgtacccgtcccgccgtcccgcttcgctccgacgagttcgcttttcgtgaccgaccgagtcatccaaccaagcatccagagcgatcgccaatgattctaatagtgtgtgttcatcatattggacgtgaacgtactggttggcgatctagcaaggggggacagtgaggaacgattggcgatttgacgaggacgaggtcgattgattggcgatatcatcgtttctatgaatatgctcccgtaagtgaacgtcggacgtatttctcttagggatctcgggggtaagtcgagtttcgccagagttgcgcctatgaacgggaaaaggatggtctagcttatggtctgaacgaggatagtaagctgaggacttttgctcctagaccattgttgtctcgaaaagctgggcatagagggtcgagacgaacaacacgccccccccccttgcttatgctaccaacgcctggaggtgcacctcgatcctgggtgtcccgatcaagatcaaagcagctggtcgggtcacaaagtttgcgggacacgattcgatgtccgtctcggggggtcgaacattcgcaagtagcaagtagattgcgatggggtggatagggggactcttgtgacctcgccctgtagtacacgacctgaccctgtacgcctcccagcatgtacgaccacacaaagactcggtgaaacgcctcgaccgacggtcagtggatgagaagcaggaaccgggaccgcctcccttgaacggatatacagctgacatgtatcacgacaggtatatcccctctacagagtgggccgcaacaagcgtcatcttcacacattcgaagaaagattaaatgctaaattcgctggatttcgaatgcgctctctccccccatggttcggacgacctagacaagccgagctttgacctctgtgataacaagatccgacgactcggtccgagcatctcttgaagaagactggccctaaagctggaacgaccacatcttcacgggcggccgggcggtcaacgtacagaagtactcttacatcccgtctcgacctcgctggaccgaccagcgaccagggtgatgaactccagtcacgagaagagaaaaacggggacgatcaccgaacacgtccgaagctacagtacagtagtcttccccgcccgaccgggatcggatcggaaccaagtgtttttcccctcgtcctctccactcgggtgcgggtcgatgattgttttcgaacgaccaacgaccgacaaggaagcgagaaacaaaatatggggggccggtcgacgctgcgatgttgacaccattcaggccagagaggactgggggtcagcgcttagaggaggatgaattcgaactggtcgataggggattcgaaatcaaaaaacatccgtaaggcgatgcggggggtcgatcacgtgaacagcgcagttgaaagggggattgatttcggatggtccgtcataagcgacggctggctgggcgctggcagcaagccgtccgtcgcacctgggcgacgatgacactgctgctgtgccccggattaggctgggggttagtgtacctcggtcactgcctcgcttcctggcccgacgttcaaacttcgaaatcccgagttggacgatttcgaaccatcacagccatcagcttgcgcgccggtgaaacgatttcgaacgcccagctcaggtctcaacgacccatccgtcgtccgttttttccccctcttttcgttgtctgtctgtgtgtccccaccttgctgttttcgtcatcgacctcgcttgtgatgaatttttcggggctacgtggggtcatcgtagcctgtggaggaggccaggtatataacaaaccgagggtcgattgtgatggtggcacctctttctgctacgtactgctacgtgtaatctccgacctaaacccgcaatcactacgacgactcactactttgcgacctcgttatccgtgagtcatgtgcccaaaccacaatcacaacgacgtgcgacgtgcgattgtgatataatcaccaacgcatcataaaagcatcatcaaccacgttcgacccctttttcactccgatcactcacacaacatcattatttctaaacagagtacgcagtgaagtttacgatcacgctgtaacaacaaatcagtgtggtatcgagtcagaaaaccaagattccaggagaaccatcagtcggtgagtgttgggtcggagttaggttttcgataaaggatgtttgcctggagccggcgcggtttcgacaccgagacgagacaagatcaaacgagacaaacgagtcacgagtcgcttcggttcggggtgatacctaattcgacgtcgacgtcgaggtcgagtgagaccagacgaaacccggggtttgatcgaacgagacgatcagcgttgttatcgcaagtgaaaggaagcaagcgaagcaaggacggagagcggggtttgaccgagacttgcccagctcgacgtcgaggtcgaggttgatgacgatgacgatctcaacgttgcgaggggtgctcacgtggacatcgagagcctggagcctagagagataaagtcgggtcgaggcgacgagagttgctttgatacggagtggaaaggaagtcttgaggaaggtcgacgggtgatccgatgatatcgacgagtcgagacgagacgagtgcaccaggtgtgaagacggggacggcttatcgcgagcatctctgtctgccctcttggtcctcgtcgtcgtccgtcgtgatggggatttcctttgactcgacggtatgatcaagaccatccgtcctagatcacgcaagaacgctacagagtggtatgatcgagaaagtccgacgtcgtttgaagaatccgcgattcgagatgaggtcgaaatcgatttgaaactcggcttatctctcttcgtttgcttttacttttcactaattccctacctctgtgtttttacgtcgctctttgccttgctttgtctcggactatctcccgcacctcctaacgaaatatcgacctgcctaccaccacgacccggtcaccagatcaatcgcaaaccgagaagtcgacctgaacccccactccgcaccgattttttttcgatccccgaaccgtctcgacgcatcctcaatccgagataagcttcagacgtcacccgacgaggaaaagacgatataaggaagagtagcatgagcgtgagtcgcaggtttgggtcgatagagggtgggagagcaaaaagttgactgtgctctattcatccccgactcccgcctgaacctaaccgaactgaattcgcgatcgaaacgatgacgctcctcatgtcccagatggacgccgtgactaccaagatggagaatgtgagcacggtaccccagcggccagaccttcccaggcgaggacagtagctgatacctcgatgtcgccacagttattgaaagccggtggatcggtcttgccctccgccttgaggccggacggtgtctcccagaacgggagcggtacgtctaccccgcagaggttgaggaaggatacgatgtgagtcgagcgactggaggcgggactcgtcaacggcaggagtggcgctgatcgacatcgcccctgtgctcgtcctcgtagcggctacaagcagaccgatttccctcaaaaagaccaacagcgaaccgaggtcgaacgtatcgtcctcgccctcggcttcatcccccaacccttgatcgcaggggaagtcaactggtactaccaatccctcgggatcgacaacacctactttttgaacgaatccccgaccgtcatcgccgaggccatcttgtcgttgtacgcggccaaggtgatggcctacaccaagcacgatccgaacaggttgaccatcgatctcgaaaacgtcacgaccgaggagatgagcaaggccgccggtgggaaaaagaaggagggcgccgtatggattcataccagtcagcccgggatcagcgccgtcgaaggtcccggtgccgaggtcgagaagaagtgagcggtccgcccctcgagcgtgtcgagagccttatactgacacggtgtctgccccggtaggatcgacgaaaactacctcaacaactcgaccgtcgaaaaggcttaccgactcgagacttaccgatcgaccggagccatctcgtcggcctcgcgtcaacaactccgatgctactttttgcaacgatgcgtctttcccgaatccaacccgccctcgctggattccgacgaacccgtcgacatcaagaccgtctcggacaggtcgttcctcgaaaaggcctcggacaagacgctcgagatttaccagcacgtcatggatcaggtcaggaagaggagcggacccgtgatcgaactgttcgaggtcgaggagagcagggagaggagggtcgtcatcggttacaagatgggagggaccaagcagttcttttccgccctttccgatctttaccacttttacggtctttagtgagtgggcgggcgcgcgtgcgtgcttgtaattggcctgccgctaacgtcgcgttgcctgcgaatgcctcaccagctcggctcgaaaatacgtcgagcagttttccaacgggatcaccatcatctcgatgtacctcaacccggtccccaacacgcgagctcctcctatcgagcactcgatccaccaggtcatcaaagagacctcgctcttgtactgtctcccccacaacccgttcttctcggtcagggccaatccggacagggatcacgccgttcaggaagccacctacgcctatgtcggttggatctttgctcagcacttttgtaaccgtttgggaaccagctacattgcgctcaagaaccgtgagtccagcaacagctcgttcgagttcgccaggctgactcaccacgctccgcccccgcagtcttggacgagaacaacccgtcccacgccgaggccttgcagagcatcaagaccaggctccgcgacgagacttttacccgtcaatacatccaggagactctgcaaaactaccccgaactcgtcaggatgtgttacattcactttgccatgatccactaccccgccttggacgaggccagtcagctcaccccgacgctcagtttccagcgactcaagaccgagcagcccttggaggaggccgagctcgtccgtgagatccgcaagcgatgcaacgacgaagaggctcagattctcgaggcccttttggtattcaacaagcacgtcctcaagaccaacttctaccagccgaccaaggtcgccctgtctttccgactcaaacccgactttttgccccagatcgagtaccccttgaccccgttcggaatcttctttgtcgtcggatccgatttccgaggattccacgtcaggttcaaggacgtcgctcgaggtggtgtccgtgtcgtccgatcgcgaggtcgcgaggattatgccaagaacgcgaggaccttgttcgacgaggcatacgcgttggccagcactcagcagaaaaagtgagtcgacgacgggtggaacccctagataccgttccaattcgacacgaagctgacactgcgtgcgtctctaggaactgtctaatcgtcgaaggaggtgccaaggctgccatcttgcccaacctcgatgccaactttaccctctgctttgaaaactttgtcgacgccatcatcgacctgctcattcccggtcaatcccctggaatcaaggaaaagatcgtcgacctttccggacgcaaagaccccgaggtcttgttctttgggcccgacgagaacactgccggtctcatggactgggcttgtttccacgcgcgaaagaggaacgccccgtggtggaaggtgtgtggcggcacggtccgactttttttgccttcgagacgccatgctgatcttgacacctccctgtagtccttcaccaccggaaagagcgcttcagctctcggtggtatcccccacgacgtctacggaatgacctcgttgtccgttcgacagtacttgctcggtctctaccgaacccacggtctcaccgagaagaacgtcaccaaggttcaaatcggtggacccgacggtgatcttggatccaacgagatcttgttgagcaacgacaagactgtgtgagtccagtctcggtcgcatggtcacctccacatcgcgtctattggctaatcttggcgtgccattcccccgtacccagtgccatcgtcgacggaagcggagtcttgcatgaccccaacggtatcgaccgaagcgagcttacccgtctcgccaaggcccgaaagaccgtgtccgaaatcgaccggtccaagatcggacccggcggatacctcatcctcctcgaggacaagagcttcaccctgccttccggcgaggtcattgccgatggcctcactttcaggaacactgcccatctccgtttcaaggccgacatgtttgtgccctgtggaggtcgaccccaggccatcaacttgtccaacgtcaaccaattgttcgacgccgagggcaagtgtcacttcaagtacattgtcgagggagccaacttgttcatcactcaagaggcccgtgagcgactcgaatccaaggggatcgaactctacaaggactcgagcgccaacaagggaggtgtcacctcgagttcgcaagaggtcttggccggtctcgctctcaatgacgaagagtacattgccaacatgttgttcaaggacggcgcgcccacgcccttctacgaggcctacgtcaaggacatccaggccttgatcgcccgaaacgcctcggccgagtttgtcgccctcaacaaggagtacgctcgaaacaacggcaaggtcttgcgcaccaggatcgccgacgagcttgcgagtgcgctcaacaacctccaggccgagctcgagaccagcgctttgtacgagcaggtcgagagccgaaggaacgtcttggccagggctttccccaagaccttgatcgactttgtcggactcgacaagctgctcgaacgtcttcccgagcctgtgagtttccggtcgcaagtggtcattggtaggacgatgctgacgactagtacttgcccttacagtacctccgtgccctctggagtgtcaagatcgcttccgactttgtctttagcaagggtctcggtgccagtcaggtcgactttttcctcttcttctcgtcattgtcctcgtgatcattggcgtagccgtctgtttttccatctcctttcccatctccatcacttgcattccgacacatcaacaatttccttacgcagtaaaacatcagttctctcatctagtcattgtcataaaactctccgtcaatatgcatttgtaatcttttcaaacttcctttcccgtcgtcacgtcaattgcgctcataagagtgcatttctggtacaaagattgggggcgtcattcaagcggcgaaggagcaggatgtcgatacaggaaaaagccgggcggaacgaaaacccctagatcaattgcacgcatcctgacctgggtccttgcctgcccacccgcaatttgacaactgatatgcaggggtctgcccgtggatcatatactcgatgctctgttcgagttcctccacagacacctcggcggagaacccgttctgttcgacctgcccttcatggaccgacattccaagaaagacgcgacggtccttttccgcgcaaacgatggaagcgccgttggcatctttgcactctcgactgatgtcggttatcacaaaggtggtactaggccgcagatgagcggcatcgcttttgctctggaccaagactaagctggagaacggtggcgcggcgtccagggctaccgcgacgccgtgaaccgaccggtcacccttgaaaatgcgcttgaccggaggcaatccagtggtcataccgtagatagcgagcagctgatcatcgcgagtgacggtatcatttaggttttcaggcaacccgaactgtttgagcctctgcttgacttgaggcaattgaacagtgctgacgagcgcactcttccacaattgattgctgttcacgtccgtcggcgtctcctctttccacgtggtattgacacgcagctcatttgggccgggccacaggttgacactggcatacatgtcctgtccattgcgcaggacgttcatggtacgagcatggccggtgtcttctccgcttacgatcttggcccactcctccggaatctgagtatcgatgttgtagtcgctagcattaaacatgcggacggcggtccacgatcgttcgatatagaattgggcttcgcagacttcagagaatcgacgacggagggtcagctcaccacctatgggaagtgaaagtcatcagcaaattcgcgttgccgcacgcgttaggcacgtcacttaccgacgttggcggattcgctgacgctgtaatcgctagcgatagatagagcacctctccaaagatacttatcactgactgcggcagcctttgccatcgcggcattgattttcgaagtcgccgacgcgatggccaggtcggccgatgcctcgggtggaatatacgtactcgtcgccgtcttggttacgacgctaggagctccggtagcattgacggtcgctgttacgagattggtacggatgaccgttgtggtaggttggggtgcgtacgaagagccatcacaggcaagtgtcaccccctgtggatcgacgatcggttgtgtggttccaggcgcgacgacttgagtacaagcactacctgcagtcacggtaggaatgggctgaggtaaggctgggtatgtgcatatgcaaatatcagctgaaacccccgccagattccgattcgagtcctccggacgtaccccgggccaatcctgtgagcgccaagaaatagacgaggcgcatcatgcagcgatagaacggaagtgaaagagtgtgatacttgaagtgaacgttggagtggggtaattgtgagtatatgggaggggatggtctcgaagggtgcaaggccaccgtcaaccccgtctgtagctgggaaagcgctttatatgtgcttggttccagttggctcctgatttgaaacagccaggggccaggggcggaatatctgttccccgtgtttggctggggcaagatgaaaggaatgagacgtgagcgtctgcatgtaggcatttggcttggtgtattgtcaaagcgcctgtgtcagactgctttcatgtcataacttctcactttatgcctccacgaggttttccggcgagcattcgccagcgacagttctcgtgctcagtccatatctaaccaccctttcagcctcgagtcggagtttgggctcgccttgccaaaggatctgaaagtttctgctgtgaaccgatcctactcgcatatatggcggtaatagtcgactcgatgtagattgtatcgccgggcaactggcacccaggcgtgcatcgcatgccagaagtcagattgatgcgcaccgtagctatcagatacttcacgacgcaatatggaacataaatcgcctccgcttcacaacagccgattggcactgtcaccttttaagatatctctagagactcatcgacccacggtcagcgataaattcggacaagatgcccgaccagcattttgatcaaatgtaaaatacgagtacgatgcgggcaggtacagacgcgactcgatttttcctgttgcagatcgtgttgcggcctgtaacacggctatgtctcctcggaggattggtagtctcattgttgcacacactcggttgagaagtacccgacgaccagatgacctcgtagaacggcttttctgggttctgcaaccttgtctcgaggatttctctgacggcgttttcattccccatcgattttgactcgtaggacccaatgccggggccagtatacaattcgatctcgaccttgaaggggcaaaagaagttgagatcctcgtcgtgaacggcgctcacgggctgccatctctttgttatgattcctccgccttgtctgtcacagcgctcgtaaattttagcagtgccttcaccgccagatgaaggaaagtcaaagatttcgaccttatggtgacctgtgtctgacatgatactctgctgcggcttaatgatcgaagagagtcaatttgtgtccgtgggaaattgacgccaaacaatcatggcgaccatagtatttgtgaatcctcttgccagaacacggattggtatatgcaaaatcagggtcgatcagtctgggtgagacggatcagagatcacgttcgacaaaggagccgaacctcttcaacatcgataaccgtaactacatcgagtgagtatgatgtcgatcagctgtttcgatggagtttcgtcgaactgtgtagttcacgccacgaaccacatgaccgtcgattagcgaagcagccaagtcgccaccgctattaggtaagacgagactagcgcgacatctattcccctggttaaacctgtcacctggattcaaccttggtttacttacaacgagcaacgtttatggatgactgattgctacgggaagcttcggtcttcagcagacttgtggtaatctatagtacggcggtgttttcggcgatgactctctaacagcttccccggatcgttgttgaagggggacctgttcaacaacaatgtcgatctgtgcctttcctggacttgttgtgcttccatgccaggcaatcaaagatgtctcaacagctgatcagacacttatgggcacatgaccggaggtactgtccggagtggcaagggcaccgctcatctagtcagtcgaggttgtaatggcttttgcagcacatacgattgagttgatgccaaccaccacagggctgtggtgggctaccaatcgcttcttgataatctggctcctcccaatgtagaatttcagagccgctggggaaaccaaactttgatccctgcaagtcccctcgtacatatccccaagtacctgcttcaacatgggtattgtgttcgtagattccaggagagatatcccgggggtcaacaagacatcattccttccaccctagcaccggaagtatgtaattcgcgtccaattccgccgcgtctacaagacgctacatgccctggtattctctgcgcacccggaattagctcagtgctatcaagacgcggcagaaggtctatcggagtcaagttacatacctccggtctcgatcagaaaatgtacgaaaccctcggagggctgtcctggaatctatggatacaacccccatgttagagcaggtaaatggtattacaaggggacttgggagatgggacaccgggctggtgagcttgctgatcaaagtatggttttcgccgtgctctcagtggttcagaacttctacatcggaaggagccagaatatcaagaagcgattggcagaggaaaaaggtgaggatgaatggacgaggcctctcattgccgaggtcttgcatgcgcagatatgagcctgtgaagaaggctaccatgctgtcctggaccatataaattcgctctttaggcttctacgccacgactactttgtgccacatcttaggatgtggacgtctgttctgcctgatgtttctctatgttactgacttcacctgattttacacggatcgatcgaatcctcgcataatcatacagccctcccgccaaaaaatccatactagaccccacccgtaaacgaatcgcgaaacattgtagagcggcgatgacaggttgaacgaacttctagacactggaggtcagaggtgggaattcacctgaagagcttctgatgatggtcacgtcggaaatgctagtcgagtaaccggtttgagcttgacgaagttgatcagctttgagctttttgtccaaccaggctttggtttctgcttctgctgcccaagcccaaaagtctgaaaggtgtgtccaccgatcggaccatatcgcgatgggtacttcctctctcccttcaatggtccagtccacaaaaccaagtcgttcaattcttgcaacattgcgatagattgcgatgtcaatctgaacgcctgatcgtggtgcaaagggctgggtttggagtctctctgagtctcgtgcagatgagtgtcaggatctcaaatggccagttgctcggagttctgcactactttgcatcagcgctagatgcgtcggaagtctgtgccgtactcggagctttactaggctccaattccgacccggctgtactcttagatgacaaggagaaagtcccgccttgaccagtcgatttgtactcaatctcaacgagtttttcaatcttttctctgacagcacggaagtttcaccccaattgacacgcatggtagcgacgtgctgacgttcttgcccatttggtccgttgggtaaagagaaagtcacctctcgagcggtcaagacgaggtcttttcggccagacccggtatctcccggtatcttcatcgacgaggacaggtacttactgcctcgtttcattgtatgggtagatatgtacggcgtggttcaatgccatagttaaggctcaagggacaaaagacggtcgacgaagcaggcgagaggaaaagataagaattttgtgactttgttgggttgggttggggggggagggggacaaatctgatgtattgttctggatcgagcctacccaatcgtcaccttgagcgaactctggtcgtccacaagaacaaagggaacagttaacagaggaggcgagacgtacgtgatcgagaaactcgggaataacgggtttgcgtcatgtcatcacgtcatcacgtgatcaggcgccaagccagaatatgtatggggtggtcgttcacctcctgatagagtcagtagctcagtagcttctcacaggctgactctcatgacacactgagagtacttttggcgcggtggcaatcccatcatatctggacaagacgtgtctttggtctcgtcttgatgtagaaaccgaggttcataagtggaaaaccccttgatccagtcgatgtcagacttcgatgcctgttgtcagcagcgtttggtaggcatgagaccgaaatctccggtacgagtgcacatgtgcgaagaggtgtttctagctttgcaacatcacaacgtcgcaaacgccgcaacgcccctgtcacccagtagagcgcaggccgcaccatcgcttgccattgagtttaagctaaggaattgtgcattgtcattcggaaagatgtgtcgcttcccgtcgctattcgaagaactcgccaacaggcacttcgttgaagctcaatcttggtattccgtgtcgaaacggtggtgccgcatacaaagaggtctttcctgcctttcagcaaccatatctcacttaagcctcggtgaaaacacatccgaattaaattgaaaagactgggactcaaaggatcgcaaaagactccatgtcatttcagttcactgatgaagggccatgcaactgcgatctatagcagtaaagttatgatctacgagtacactcagagctgaaggcagattgccaaactaccagactagttctaaactcgccctcgtggcactttgcccggtcactccgtgttagcagtaacctccggaacaaggttgaaagtgtatccagaagagccagatacgctacgactgttgtcgctgatcagcgtcgattgcgtacgggaggctgcggagtttacactgccttggaaccgcctcttgatgatacgctcaatccaagctttctggatcggggtgggctttgcgggtcttcaccgtacggggcgtaaatagtggcactgattgaacacaacagcccgtctgggagccaaaattgccattgtactcctgccttattctgttgatacactccggcatcgacgttttgatggatcacaatctcgaccctgcagctgaccgtgtcgactggctcatttatcctgagacccatggtaggaccaggtctagtgagacggtgctcaaagtcgtaggtgtgcatgttagggttcatggaaattgcttttcgactcggtttggggagatagggatgcctcgttgatgcaatatttgatcaaggaaggctgggtaatgatccgatcttctctgactttatatagtccatataaagatgcaggaaaacccgggtaaacccgtatgtcggtcactttcgaggaaccaatcagcagtttttgcaattccgaccggtgtgtcgcagtagagcgacaaagggaacccagataaacggctgggttgtggcatcatcaatcacatgaccgattatcaattactctcggtttcgcttctcaacacctgagtcaaaggtgtgacattgtccagcttttcgagacggcgatgattgtgtctaaagtggtcggttctacgcctttcgtctcgtactgacccggcctgcgccacataacctgaaaagaggtatctaatgaccacgggaagcattctttacataaagtcacttggcagactgccaataccgactaattttgcctccaagctgatccctaaacgaacctgaccctcatactttcctttcttttgccgctgcaactttgattctgtacggtttagtcagcttgtcgttggggctgaccctggatcgctccggcaaagatagcaatgtggaatatggaatggaagtcagatgatatttcgatacggcggttccgatggtaagtagctggtgatcgttaacatcaaagtcgcctcaggtgtctttggtcgaggtcatccatatgcccctcacatcagtatcgggtcccactcgccggaacacttgctggatatgcgcaagttgaatcaagggcgctcagtttcgcctacggaatatgctcacggttcccgaggcctgctgcgaaaccgactacaaggggtcgtacgatcagaatgaaacaatcccaccttgcggaaatggcaataatgttaaagaagcaaggtggagtagatacaccgaaatttcgtaatgagctacccccatgacccccaattctcactgggtggtgccatcagtctggatcctggacgattcgacaggtgtgaaggtagactcaaggtcttcccacatgctttgttcgaattttgcgacatctttttctttgagcttggccatgacaagctcatagacatcatccgcggatctcaaatcgcttctccatatcggccgtccttgttgagcgccttggtaaacgagaactttgactttccatgtatccgcgaccccgtcatccggatgtaccgctcggaatttgtattccccgcactccgcctggcactctccccctctttccgtattcgcggccttgtagcaattttcctcgtcatgccagccatccaagccctccaccacaacttggtggatgggagccatatcttgtatttcctggtgttatagcggtgcaagaaggagggaacgtcttgtaggtacgatactggggtgctgtgtgcataacttaccgagccaggccaattggtacgcttaagattgaagagcatcgagttcatttatacgtattcagcatcgcgttaaattgcaagcagcatgtagttgtcacgcaagatggcgcgatgtgacatcgaaggcgagctttagatgaacgataaatgatcgctcacgcggaatgttattcgttaataatgtcacacacgctacgactcctttgatggatgtcgcatagccgagcgatcgacaattgttatgagcaaagtggagaaggagaagtggcgagcggaagagcggagctaggcgctgcccatcgtgtgggacgtcgcattcctttggtctcatcatcaaacataatgttgtcatgacgccatcatcgctgaacaggcttaagacgcagagaaaatttctgtgttgataaaattagatcgccttttcaaaaaccattaattgttcatcgaagcggagaaacggggtcactttatccattgaggttctcgtatccgcttgtaccgcagcccagcgcttaaaggatcatattctgcggcttttattacttggtacatgcctcccatgggtcctttcacgatgaccagcgatgttgattaagcggtcaaaaaactgtagacattgacctacacttgctattctgctttcgcaggagaaaataattccgtttagatccgctttgagcaccagaactggagtggagggtttatacactgccaaattcgatatatctcccgatgagcattgcgagcagacaagtcgtcaaattgaaatcccataatcgaaacagttacacacgtatgcacgaggtgtagcgttgttctctcgaacttgacgcatggccgtcattcctcagggtgactggcgtctattcctcctacgtgtatcgcatcactgttgccgatccgcgtgtctttcctcggtatcgaaatttgggcaaattctcaagcatggtttcatggaagaaccaatgttacagtacggtatcgacgcgactaactcaaggcgttccaaccacacaccgcactcgtcaaagaacctgtccgctcggcttatatagatagtggattcggtcggaatgttatcagacgcgctcatgggtcgcagacggacaagcagaatctgtgctcgggaaagtttcactaatacggcataggtaaaaatccgcgtctgagggacaactttgacctggctccctcatgacttatcagcggtatgtaggtgaatgaagtatcgcggttctagaaaagagcatggatatttttcgcatgattctcaacttggattgacaggcagtgcatctatggccatacactagactccgaagaaggcggtggctcactcccgtcaccagcggtggttgcaggttgtgagtgcgtaccaaccgacgaaccgtcctcaatctgtaagatggccctgaagtcgttacgaacgtgttctttgaccaagtccatgggaacaggccattcgtacttggaactggcggcaccgttcgagctgtccagcacgtagtgagtcacgcagatcgtgaagtcgaaattgtcgatgcgctctgtaccattgccgctctggtaaagattttcgcgcttgaagttgccgtcaagtccaagagcacccttttcgacaaatgcgtagtacagcttgatcccttgggctggtggagggggtaaccctggtagcaagggctcataagccggtgcgttcatcctcattatctcgtagtcttgctcttctgcttcggccggctgtccttgactagggtccatctttcagaatctgaggcactaaggggctcgagtatgtgagaagagcgaagagaacggtcagaacacctgaagttggaatgaggttggtcattcatgattgaaattctggtatatatagatatttgactgggggaccggctgaagggcgaaagcacgaaagtggttcggcgaagcactcgtgaaagcgaacgaaagaggactagcaggtcgcgagaaccagatgctatcctgtgatgtcgagtcgtcataacgacgaggatcatcaaaggaattcagtcgaggagccgatctggggttcttcaagatcgctggccgtccagactccttagcgaaatgctcgtcatctgactggcttcatggatgatcagatgaccgacctgtgtaccgaatctcgaacacagccaccacgagtcgatcgcaacataggctcatgaaaatcgcagtaagtcgaaaaatcaagggaagtcatgatatttgccacccaacgccccacacgtcgattgatcatttcgtcatcaatccgcgccaatttcccgtcgtaagcagctaaaaggcaagaatcatggtcacgatgatatcctttgtacctcctactccgacgatatgcatcataccgatcataccatgatctcgtcctcgtccttatcctgctcctagtccttgtcctagtcctcttcctagtaatcctttgcacctctcatcaatcacacaccccaaccccccacaccaaatcccacctcctcgaccgacctgatggcagctctcgccgctccgatgcgtcaggtgatcaaagaggaaacttcgatcttgctctccaccgccgccgaatcgctcacagcctcgacgagcatggcggcgagagaggtggcagtcaaggaaagcccgttggttgttgggagggtcgctgcggagggggtcgtcgggagggggttgatggaggaaggagtggcgggatgtgagttctatcaggcgtgggttgtagattggacgtagggacagagctgattcgtactatcatccacgacatactagctcgaacaaatgtctcgcaacatctcgagatcctcaaatccaccgtccaccctcctaccggacctacagccaccccacccacgaactcgctcatcaacccttccggcttaccttccatcccgaacgcccatctccacccttccatccccccttcaaccatcctcgagagcctctctaccaccgcccgagcttcagcggagaaagacggcagcaaggtctttagcggaggattgagacaggccgtagagaatgctcttcagacgggagcgcaggaacaggtagaagtggtcgtcgataccgctcacgttttgggagagctcaagactatttgagatgtcgctccgagacaacgtcgttatacactgtatcctacaaccaagatctagcttttctttcgtttcgtattatcatatccatcggctcttatggcgatcatcgcctgttcaccctcatcggacctattccaaaagtcggcgactggttacgcgggacgttcaacgggcgagagataagggacatcaacatctaactacctaaattgcaaaccaaccaacgtccatatgccctctccctcaaatctctatcgtacctcgattactcatagcaagcatgaactttacggcctcgtcagttgacgagctactcagtctggactcgatccgtgggaccttgatcaggctggaagataccatcatcttctgtacgtgaccccgtccaccccttcctcgccctgtctctgccagtccgtacatacaccgctgatacgcccggcctcttcctcacgctgcatagacctgatcgaacgtgctcagttcgccttgaatgccaagatctacagacccaatgagtttgcagaactggacaagctcggtttcgaggggagttggttgcagtggttcttgttcgagattgaatgtttccatggtcagtatcaagggcgctcctggttgagatgccgtacaggggcaggttgttgatacgttctggatgcatggtgtagccagggcgagacggtatactaggtgagcagttcacagctggcacacgggaaagccattcgggaccgctaacccgacaaacgacagccccgatgaatacccattcacgcccatcgagaagcttccacccccgatcatcaccgtgcaagattacccttccctcctccacccggcgtcgacggcacacccatcgaccaatgtcaaccataggatcctaaagttttacatcgaggaaatcgtacccaagatcaccgagggcgtgcaggtcaagggcgagaagaagggagagcaaggggccagggatgatgggaattacgggagcagtgcgacaagggatgtcgaggtcttgcaagctctgagtaggaggattcatttcggtgagcagcgggtcgacgtcgacgtcgacatgagcaggtgacacggctgacgggatgatcttgaatggggaacgcactaggcatgtttgtctcggagagcaagttccgacaagctcctcacgatttcatccctcacatcctctcgaacccgcccaaccgtgaagcactcgcagggctgatcactaaacccgccgtggaggccgccctcctcgtccgtctgggtaacaaggccaacctctttggtgccgagttggacgcgcaaggtaaccttaaagagatcaggggggaaggcaggatcaagacggacgaggtggtcaagctgtacagagactgggtgatccctctcaccaaggacgtcgaggtggattacctcgaacatcgcttggagggcgtcgagcagagtcagattgacgagtggatggccgccggcaagaagggcgagagtgggtgaaggtcgacacggattgacgtgggtacggtgatcaacatggccgagaacgaggccaaaagtcgtgtccgatacgatcacattttgcattgacgttccacctggatccattcactgttccagggcgagcttgagaggttgtctatatatatggacaacaagcaatcgagctatagccagcactcgtgtcgtattgagcagactttcaggattttgaagatgcgctttcaatcgttgcgttggctcacggatagcatcttgcatacacgcaagagcgatgtagttgcgagcgcagagttccaggtactttcgacggagtaacgttcctcgattcgcaaagacccaaaatttctctatgcatcggagtcttcctcatcgcgggcaacgaggaaggattgcagctggccaaaggcggcatcaaactgagtgagaccagcgtgtacatccaggtccaggtacctcttgccctgcgctttgtagcgtccggagagaatgctccacttctgtggctcagtaccccagacttcgtggtggattcctttcatggacgtagaatcctcacgaacatcttcggtcttgctgttagcggtctccctttgctgactcttccacatgccgcgatcaggatgagaggaccgctggaacttgacttggaatcgttgaaacgcgccttcgaccttatcacagatatgctcgaaaatcgtattgacatctctggttgtgatcggtctccatatgatcgtgtcctcacttggttccggtttttccccaaaatccgccaccatgcaggttctaccgtcatcgtcttcaagctgtgctgcgcatatattgcaaagatggtgcatacgaatagaagaagcctaagcgataaagcatggcgatcatccatcttcagccgtcctccatttccgttcgtcgcatctagagtcagccgttgtccgtgggactcgcaaaaggtccttgctgcactgtgagcgcgcttgcaaattgacacgagtttagatctgaagcgttcgctcaactggatacgctctggcttcttgttacacaaggtactaagtggaaacaaacaggacgacatctggtccgacttgaacgtggatcgaattgaatgggaacgggaatgggaggcggatgcggtccaaaacttgtaggcggcgtattacagtggtgtcggtgtcgaaagcgtacggcctctgggcaggatctatatatctcgatcaagttgagtgaaaaagcggtcgttatcgagtgcatatgcttccgatttctatctaatatgcttccgaaacatcgtggaaccgagctggaaaccggctgaagctttgagcttggtcgcgatagagaacgcctcgaaaggcaggtactcttacattgagttgtatacgctctgatcggatctctgaatatggttttggtgtgttctatttttacaacttgtttcccggtctaggcggcatactcgacgtgcccaacagtgttcttcttctccccaccgagtttctcatcgtcctgaacaatggcctcctgggcagcggcgttgacagagttctcgctagggccgtcaaagatctctgcaatctcctcgagcattctccctttggtctcagggaagataaagtagactggcgagtaatcgcgattcagaacgtgtttgacggcttgatcgaatcgagagatggcttactgcagatgatggcaatgaccaggacgatatcgtaaacgatgtagtacttccaggccagagcgtccaaggcaatagggttgacctgttttattgcgggcaacgaagaggtcagtttcgggaatcgagatttgaagccgttgaagaagagacgcacgtattggttgaagaacaaggcgatttgaatggccaattgcaaaacggcgtttcctttcgatcggaggttgaagggcaagatctcgttggggtaggcgagggtaagaccggtaaacgcgatactgtaagacccgttgtacaggaagaggaaggcgatggtctacgacacgacagttgctaacgtcagtacgaccgtgacgaatggacccgtacgagctttctacgacccatactcacggcgtatcccgcaccggtggttcccttttgcgcaaagacggcagagcaagcggtgatactgatgtaacacatcaacatgccgatggccgaggccaaccagagaggtcgccttccgagcctttcacagagaagcgcagcgccgatcgcccaaagccagttcctgcggaggatcaaggattagtacgacgagtcgaacgagggtgcgcgggtcgatcttaccagacttgaagacctccgttgagaccagcctgttgggtagaatccgtgatacctatcggccaggaagcaatcatctggtcaacatcttggctaccagtcagatgcgactcgaccagacactcaccgacgctacggaggatcgaggcgagatagtacgagatgataccgttaccaacccattgactgaagaaaccgacgagctgaagcgagtaaaacacagctcatcgtcaggatcgcccatctagtctctctttgatcgtgtcggacacttacgacaatgacgagcaacctgtgtcggttacctcggctcttgaagaagctcatgtagctgacaccggcggtggccttcttctcgaattcaatggcggcgcagatctcctggtattcaaacctatgggccgaggcaatttggatcagatccgactttccttctcgaaggtgtaggcgactcactggacgagctcatcctgttcatcaccgttggcgtgatacctcgcaagagtacggagagccaactcgttctttccgacgctgacgaggaatcgaggcgattcgccgatgaaccagagcaaagtcagttggatgacacagggcaagacttgcagcagctagatatgcgcaagagataggggtaagtcctggttctttgaggcggttgccaagacgacggaactcacacaggggagacgccaggcccagtctccggcaaggttgagcgttccgaaacaggtccaggcggcgataatactaccgactagagaaggattgagatgaaccagagtcagtcaagtttgttccccttttcttgagaggaggaccgcaagtcttactgaaccaacaagtgttgatcaaagccgccgcttgaggtcggtttcgaggatgactgatctcggtgacatagggagccgcgcctactccgaatgatcagatatcagcctcgagtttggcagggaacgagccccgaaatcacctaccgatgccctcgaaggaagcacccagaccgacaacgaatcgtccggccaacatggggtcgccacccttcgtaaaagtctggacgagggatccgatgatgatgaggaccgcaccgatggctacaatgtcgaggatcaggtgggttccgcggggaatcgaggtggatcgggttactcacccatacagatctttcggccgtatttatcaccaacccaggcggcggggagcagagcggggatgctatcatagcgtgaactcttaaaaatttagtcttgctgatcccgcaaaacagatccccctttggaactcacgctccaagagggtaggcggccgagatgattccgagcttattaccgtcagggtaaccgaggacggcatcgaacccgtcgatcgtctgcagaccgttgaacagcgaaccgtcgtaaccagcgttgactatcgttgtaagcgggtatcacggaaagatggttaaaattaggctcgagggaaccagtttgtcaggacggggtacgacacttaccggttccgcagtaggcggcaatggtggcgatcgccaggcttcgcataccggggtctttccaccatgagctggcggcctagcaggaagatcaaagcgggagtcgcgatcgttcagtatcaaaagtcgatgcagctccactttaaatcgcaagctcacgttgttcctcaagttagaaaaatgttgcccaggggcgaaagaactagaggtagccatgttgacagtagtagtggtaattggagttggtggaggcggataaggtgcaaagcgtctgaacaaagaccgaagtggggtttccacagacagacccatcctccgaacatgttcctgcacctccgctctttatctatcaatcgaaacctggagtccatcgggatttacattctttcgagacgatcgccgtcgtgtattgttgccccaatcaaagtttggtagcgcggttcattgtcatccgtccaagcgaagttctcgcctgggtcaaagttgagcgcgccgctccaggcgccgccttgtttctgcactgccagtctgcgcatcggtcgagcggcaatggagttgagacgaggacagatgaacagcacaagagcaaagagaacgccgagcgagtcgtgaaccgacgcatgtcatgtgtgaaactgaatgagacgcggtggggcatccacttgcggatcgggtccccccctgtgcggcgcagcgtctaggcaaggccaaagggtgaacagggcgtcccgctgtcggagaaaattgggcggtcaagcggatactggacatgtgccaaggtcttgcgttcacatgtcgtgtggcttagcgggagcataagaccctaggttaacggggcccgggtggaaaaaaggggtggggaatcgggcattaaatatggggagtcgtttcgctattggtcgcccggcgatctagacgtgacaacgttacagggcggcccaggtcaagggcgatggcatcgccgaatgcggctcaattcagttggcaaaacggggcaacgcatctaacggcggaacatcaccgaccacagcggaacgtacggttccaacgtctctgacgtgaacggaagtgcctgaatccgaaagacccgagatgaaccgacctttttcgctgcgaagacacagcagacaacattctacctcgttgcatcatcaacgtcttcatcggatagtatcggtccggcaccatgcgagactaatgttgtcaaaggccatcgttcgtgtttccgagaacctccgggtgggtcgcgattagctgatggatagaccagcgtgatcgacgttttttacccgtccttgctatgacacgagcgattcatcgactcgtgtgactcgcaaggacctcgaaggacatcgctaaagttattactgattgctgagctcaacatggcaccagggctcaattgccaaaccgaaatagtctcaaggtctcataagtggtcccaaaaatgcgctcctaccttgactttccttttgaaattggctgcgaaattgcgaaacggctgcgaacactttgatctgaacgctcttcatttggtacaagcacggtcccgtcagccacgctcgtgaatagctcactccatggggataagaggtcatgacatatgactcgaacgatccagttcgtcgtggactcggacatcggtcgaagtctccccgtcggcgcccgaagtctctcatgctgtgccgttccttatcctggctcctgcaagggatctcgttcaagcccagtaccggttgcaggttgatcactttattcgttgctctcgaatcgttatatcaacgtgcacctaatcactgctcttcagcgtaggcactttgctgttgtttctttgtatgacgacccgacgtttacacatgggataggatcaggttacaagattacaagtcaacttgaagtgacatcaacgcgatcgtcatcaatcatcgattaggctaggattagcatcatgtcgttcgagcctcgccctagtatgtggacgagcctgcgggtcatcgacagacagatctgtttgagtctgtgtagctcacctgcctctcacacacaccgcagtatcgattcacgaacgctatgcgctcgtccaggacaacctcggacaaccctcgctcattacctacgtcgcggcattttcatcgtcgagcaccaaattgcctacccgaaaagcttgccagtcgagtttggatgggcttgtcgaggaacaagcgatcttgcaagcgaggatcgttgggtgggatacggtcgagccgaggtggatgcccctcattgatggacagggaaaaaggccgtgcgaggtggtctggaacaagtcgctcgcgggtgtcgatcagacaggcccactcgacaagcaagagctcggcatggcgatgcagcagctcatcaagcaggaaacagcacaagctcgtcaagagctgaacctcgagaccggggacctctatcgagtcgtccgagtcgcgacaaaggccgaagatacggggttcatcgtcctggtcgtcaatcataccatagcggatggtatgggtggactcggattcttgtccactctgatccagcggaccgtgggtcatgtcgacaggtcatcattgccattgaccctcccaccgtcggtggaaagcacaatccaggtgaagccggctctcacgaccatcattgcggccgtttggtcccagttgatcgtaccaaagcttcctacctttctggggaaccggttgacagaccaaaaagctgcctggatctggcctgaatggcccgttaaaacggagaagcaggacgatgccgacatctctaccttgcctttcgaacactcggtcgtgcttctccccgttgacctggttcagaaactggtcgcagcgtcggcaggtcacaaagctccagatggaaccccgcggatcaagctcacttcgatgttggtgtcggccctgatgcaggcgatccattcgacgatcgaggacaaggtcgaggtatacctgacaggcaatgttcccctttcggaacgcaagcccgaactgggtcatccgggtttgctcggaaatctgatggtgccagggacgtttcgctggctgttcccagccgaagaccagcgcaccgaggaggagcgattctggacgatcgcagaggacctagctcggagattggaagatgatctccgacgtgtgggaagggagacgtggggcttgacggcatacatcccaaacgacccacgaacggttacagatagccctgcgctgcagcatcgccgacgaggtgcttttaccggatgggaagactactttggcgcacctcacaagcgctcgagatattcgtcctcctttcaattcagcaacctcggtcgacttcctactttgttccccaaggtggacgccatcgtctggggtcacccggcggcttgtttcggagccgaggccgtcgaggtggattgtatcagttcaagctcgggagatgtgtggatgtgtgtcaactggagggacgggaagcaggtggatggggaattgatccagaggattgtcaaggagatgaaggggctgctaggtaggctggcccgagatgcttgttgagccaggcagagctataatatagggcgactcgagatctcaatacggttgtcaattccatcggtcttgacatgttgattgcttggactagacatataattcatgtgtttcattccccttcgccttacaaatgccggtgggctttggtgaataccacgcagtctcggtgtcatttcaactgctgacatcgctctgttttggaaggttgcgagacagttctgcgagcaggcgttgtgaagggagaaggcttgcggggtgctgtagacaggctatagttgttcagggtttgggattgagcaatcgacctattcgatgtgacgattagcacccaattccgatgcccacaagtcgtacgaagctcaccttccatcccgccagcaaccatgacgatctgccctgttgtatgtcccgaaatcctgtcactgctcatgaccaggatctggtacgccacctccaacggcgtggcaatcttcctcataggcgttctgacggagatttcgatgcgatgagtgccatctcaggtgcaaagactcgacgacaagacttacgtagcggtagccctccatttggtctcctcgtccttcaggctctcctcggccatccccgtagcgacccatccgggcgagaccgagttgatccgtcctcgaggatgaatcttgacaatctcgttcttgacgctcttcatcaagccgtgcgtcaatccggacttggacgtcgaatagtcggcgtgtccggcttcaccaaattcggccgaggtgctaccgatgatgacgatgtttggaggggcaatgtcttcttcaggtgagagcgaggccagatgggtttggtaacccttcaagaatgctcggatgagcaggaaaggtccgacgaggttgatccgttgggtacgttcaaactgagctaatgtcatgtcccacactgggaccgaaggggtcgtgaagatgccatggttgacgaccaggcagctcagaggtggccagccgttgggatccttggatgagctagtagcggggaacagatcctcgaaagcttggttgacggcctcctcttttgtcacgtcgagagcgatcgtgcggaccttgtcttcggctttgcacgagatgacatagggatcggcgtccagttcggctgatgtcgagttgtagagtgccgtgacaagagctccttgttctgcaatatcaaatacgtcgttggtactaatccctggccgtcatcaccgctggtaaagctcactcaccaaggaaaagtttgacagtcggcaggcctgttcgattctcaatgagctggattgcattgatatgctggtggttctttgagcgcacctatcccaccgttcgctcctgtgacgagcacgtgcactccctcgagtccaaggtcgatcatgataaatggaatgtctgactctggcgtcaatgataaaagagtaagtctttcttgatgtatcccagagctcaataaacacacggcgacatcgagttgagcggccactttcgaatatgcttgcgattgtcacttacgtcatagaatttacttccgtgtggcgaagtcgttcgatccgccgtcttgactggttcattgctatctgcatgtttcgcccgaggtggctttgcttcgtacaagacgatacctgaccatgtattagtgtcaggggcgatgttcaatgtgatcggatgtgccttgtaagtcctggaaaccgccgagacactcaccttcttcgacctcaacaatcctcatcattccacctctggcagatccaacataaatcctggtaatcaacttgccattttcatggaccgtggtaatgggaatgtagatccctgcgagctttctccaagtctgcgaggatctctagctacaaaccttttgaccagtgcttcccagatggtgcccttggtttgaccttgggaagaaccttctgagccgcttgccagtgttgattcttctccatccagtcagtaaaagcgtcgcggccgccaaacccatcaataatcgaggcaatgcttgtcgctgctgcagtattgcagcagatactctgaatgagcttgatgatggtacgttttctggctctcgaaaggaatccatcatcttttctgtcgtcgaccaactcgattggatgtttgcgattgctctgccctgcacagtgcatggtgacgaagtgaacgtatgttgatacagtgctcgagtacacaattgatgcatgctacagtacatgcagtagtgcatgacatgcgatgtgacagaactacagtatcaaactgaagagggtactttgacgctcgacgttacgttcgtgaagatgtcgtgattacataaacggcctggcgtgtcttcttggtgtccttcttgatgtttggagcatagaccaccgttctagcctgtaagtctgcagcggaaggacaggcgatccaggtggggtcagctcgatcatgttttgtggacgtcgtactcggacgtgctcgacctggttcaacctgatcgagacagacatgcttgttttttgccggcgtcatctcccttcgttttcattctgggttgatccggcattggattggacaaggccgctcgctttatgctagagggtgtcgacgttgaggtcaacactgatgtcgatgtcgacttggaggtcgaggtcgagatctagaaacgacgcgaggtctaccctaacttgctggacatttcgccattcatctccaaaagctcgacaccgtttctgcttggatataatctcaagcttcacagagcgccgttgcacataagctattcacaatgatgaaatcacgatcagaccgacacagctctattcgaacctgatcggatcggacccgttatcggcggtgggcttgtacgcggttgtctgtccgtattcctcatacgcaatgtgacttgggacgcagaagatgccccgttattgcacacgctcgatataggcgcgaaacggtctccgttttgagcgcgaccttaagatttgggtttcctttggatgtttcgaggaggactggacgggcactttcaagacggaagaccatgaaataggaatgatatgttatgttgagggaattcggggtcgacgggcgtcgagtcggcctttggcaaatctcggagtttgtctgagctcaggaccgcgagtcaatcggtaatctgcagtgacacagctccttggaggttcttcgtagctttccggtagtctcggtgtcaatagcctgtgatgtgctggtagtaatgctcttgaccagcgggtaacgtcgcgctcaaggtctgagctcttgagcgatcttttcctttggccagctctagaaggccgtgcgaatacgtcactttgcgcatgagagcccttggtagcggtgcttccactcctgtccagactccaacgacacgactaaagacatcgactgcggttgggacaccctatgaaccctagtgtagcgggagatgcggcctgttcagagaaattccccgcggtttcagcctggtcctctcggctcgatctcttccggtccgaaactccacgcgccgacaggccgaaatctcgagcgataaggggaaatcagctctcggggctcgttatcgttatctcttgatctccggcgagacaagtgcggtagcggatggtatatatattcgggatcaggttgtgatgcatcgcgcttcatcattgagcatggatcactgaaggatgagacgtagtctcagtttcgaccttagaccgaaatatgtttaccattttcaattgacgtaaaggccagcgatggcgcccagcgttcacccgaaatccgcgccggtcgaagcgagacgagcaagttttgcattttcttcacttccttggatcgaaaactcgcaagacgcacacacagatgctatcaacatctcgaattgtggtctatctctcgaacacctgtctttgggaccacgatcacgaatgaaacaactcaacgagacgactcttttctctccaacccgacccgaaaacgattgacgtaacgcatttcgggcggctaaatctagaatcacgtgatttctacttttcgttttctcgcaaccgaaccgcccgaaatctcaaggtggatcgagaaagttggagccatcgggtcatgtcgtcgcattttacccctatccagaaatgtaatcaagcattaacgatatcatcccatccacaccaccaccgcatagctcgtcttataccatctctagatagatatccccaaaaaagacactgaaaatgtcatccgccttcgaggctaaacaagctcaagcggctggaaccgccacgccagactcacattcccaaatcgatgccgcaggcaaagtcgagcgagatccgttcgccgagggagaagtcgatttcaggactgtaggatggatgaaaggtgggtcgaacgagctcccgtgatgtgccttccgggctgacgagcggtgtcaaatcttgatcgatagcatcggtgttcttcaccaagatgacgtttggtatcggtgtcctctcgatccctacctcgttctacacgttgggactcgtagcagggatcatctttgttctgttctggggtatcctcaacacctgtcagtagacgggcgcaaggtcgttccatatactctccctctttcgctgattcgatggtacttgcaactcagacatggcttacttgatgggtaaattcaagattaagcatccgtcgttccacgccttgcccgatgctatccagtaagtttggcatccgatggcatgatacgtctttcacgactaaatgccgacctcgacctcgactgtctcgcagcatcatggctgtcgactggggttatggaccgaaaacggcgaacatttcgatgtacttgaccgaagcgctctacctcctcacctggattctcgctgcaggagtgtcgatgcttggtctgaccattgcactcaacgccgtgtcatcacacgccacctgcaccgtcgtctttagcgtcgtcagctacatcatcatcacctgcatcgccagtatcaggaagatctctcacctcgcctgggtcacctgggtagggttcttcagtatcgtcatcgccatcatgatcatagtcatcgccgtcaccattccagatcgaccggccgcggctccccagtcggggccctttgaattaggattttcggcctaccccgccgcggccacgacgtttacgagcgccttttcggcgtccctcgccatcttttccagctcgggtaacacgccagggtatatccccgtcttggccgagatgaggcgacctcaggattacaacaaggcgttgtacgtgtgtatggggtggatcaacgcggcgtacttggcattttctaccgtcgtcttctagtaagcgcagcaccggcgagatgactgttgagtgaaccggcgctaacgggcgcatggtgtccatagctactgtggacaatgggtcgcttcgcccgctctcggatcagctgggcctaccttgaagatcgttgcctatgccatcgccatccccggattgatcgctggaggtgagagcgacgagtcgctgcacgtgcttgacatgacccgggactgaccaacctctcgccttgtacctcgtctcagccgccaccctcacccacatcgccgccaagagtctgtttgttcgaatccttcgagactcgcgtcacttgacttcggataccaagacccattgggccgtctggctctcgtgcacttttctcgtgggcttcatcggatggttactcgccgaggctatcccgttcttcggccagctcatcagtctgatcggaagtctgtgctttggacccatctcgatcatggccccggcgttgatgtggttcagcttgaacccgggcgctttcaaggggacgatgaagaagaagctgggagccgggttgcatgcgctgttcttcattatcggagcgttcgtcacggtagccggtacttagtgagtctgggggcttgatggcacgaccgaggttttcagtagagctaatcgccaccgtatgatccgttaacagcgccgtcattgtcgatatcatcgacgcgtttaacaatggcaaagtcggaggagctttctcctgcgaggataacagcaatacggttgccaattagattgctgcatctcgggaatcgaaagcatggaataggacgttttttttccgcatcgcactgcatagcaactacaacaaacgaaccaaccatctacacatacgcattcgcatctatatacatccatcaggcacacattgtataatacgacacttatcgcatcaaatcatcgaggcatcgtaatatgttcgtttcgccgagaatgagatgtcgagataggaaggttgattcaggcaggggtttgacgtgtacaaaagtctcgagtgcttcgtgtgttctcatcccgaatcaaggcgggagggaatgaggtaaagaggccatatcttggataggacgggtcgtccgaatgttcccatggagcagaatcaagtcgaaatatcacgaagtcacgaaggtcgaccgcctgacaaacacaacgcccaggggctgtataggaccccgtttgcatcgatattacgcaaccggatacaataccgaccggagtacgacatgttggcaaggatcgcggcgagactgaggatcgccctggcttttgagcgagctgaatccttctttctcggccttggatcctttttccaacaacctccaccagtagcccgtgccgtccagtctgaggttgttgttaagattgggatctcgttcgactacggtcttgcactcgggcttcaagagatcggagacgtgattgacagcttgtctggcgtcgaaactgaaacaccctttccttgggcctggctgatttacaggatattaggcgacagtcatcccccagatgatatcttgtgggccgaaccgttcttgaccgagaggatcacggatttgactgaatatggatacctgggagtccctctgataccgcttcccggggacggcaaagcgtgcgctaagggtcttgtgcaagaaggactatggccagtcgcgcgcaataggataacgaggacagtagcttcaattgctcggatgacctgggtattccgacaggggtcccgattgattggtcataccttgccatgcggattgagtctctccagagctctgtcaggtggtatgtcttacactatttactaacatggtcgcatcggggatccctccggaccaaatcgtggaggactttcttgaaaagtcctgcgctggcaacaccagctcacacgattcacagcgctcaatacgtaggcctcatcggccgaagcgcgtgtagggtatatctattgtcagatctctccctctctgtctctgagctgttttgcctcgatgcgccttacgactaggtatcagtccgatgtacgagtgctcgcatgttgccgacatctctgacgagttcggcgactttcttcttctcgtttcggatttctccgaactggagcccgggcgatatcgtccgagcaactcgttccatcgcacctgaccatcgctcaactttcccacactcgcacactcaactacctgctctcctggctactctgctacgactagagatgtcggcgaggaacgctcactgttcacacactgtacgctgatcacttgacattctcgtgtctcccgaacggccgtaagattccggtgagaacgtgtcgatattctccgatgcaacgactccaactcctcaaatacgtcaagatggggggtcgccgtaaacacatacgacggctcgtgggtcgaaacatgacgagcactgaacgacacttacacgatgtcttccgctcaagatattcccgagaccgctaaagggtacgtacctactctctcacatctcctgcttgtaacttccgtctcacccgattcctgtttacagagccttctttgaaaagacgggaggcgacgtcaccatccaagactacaaggtccctcgacaagctgatctggaaccgggtcaagcattgatcaagctcgagtatagcggggtctgtcacacggacctgcatgcgtgagtccggaggtcacgatggttcgagtagcggctttgaccttgaagctttgctcatcgccctctagactgctcgcaagtatcctaccacccagtccatactgtctgatctcccaagtgactgatcgtctcgattactgtttgtgtatcgatagggagactggccgctcgataacaagcttccgtatgtccacgatttcgacgatccccgttgaaccttgaactcaccggaccgaacggctcaaccagcttgtgcggcgggcatgaaggagcaggaacgatcgtggctatcgccgatgctacgacgaccgacctccagatcggagatcctgtagggatgaaatggcaagtccccgttcgtcagcacgtcccacctcccgaccttcgctcatcttctcgctgcgcacaggttggcagactcgtgcatgcactgcgcttactgccgtcaaggtttcgaatccctctgttcgaaagccaaactccatggcttcacccaggatggaacgttccaacagtacgcagtttcgtacacgaaccacttgaccaagattcccaagggactggggctggacgaggcggctccgatcttgtgtgcgggggtgaccgtctacaaggcgatcaagcagtcggggatcagggtcgcccagtggatcgctttacgtgagtctggctatcgagtcgagcgcaagacgaacgtaaactgaccatcgtgggttgagtcagccggggctggaggcgggttgggacacctggccatccaatacgctcaagctcagggcttgcgcgtcatcgccatcgacgtgagcctctgtcctgtaatatcagtcgattatacggtcacttatctgccgagacacttgcgcagaccggcgaagagaagaagaaactctgcaacaagctcggggccgaagtgtggatcgatttcaaggagaacaaggatatcatctcggccatcaagtcggccgtacccgatgggctcggtccgcatgccgccatcgtcaccgcagcgtgagtcggttccagatcgaacgcttgtgccgacttgcaagagattgacgagggcgttcgagtggacaggcaggcgagcggatatgaacaggcgttggagtatattcggcctggtggggtcgtcgtcgccgtgagtgtgggcaaggctagtgacctgtcggcggttcgggagcttaaaattgcaatccaggtcggattgccgccaggtgccgtgattaagagcgaagtattcacccatgcaagtacaagtagttgcacaattttggcgttcttgagctgatcttgtcgaaaacaggtcttgtatgagaagaagcttatcgcaagtcttgaaacctccaggttatctatcgtgacatcggactgatcgatttcgtccccgatccgtataacagggcagctacgtcgggaaccgtcaagacgcggacgaaggtgggatttggacaataaacggcagtaacagtcgaaactaacgtctcctcgacgcagccattgaactcgccgcgctgggcaaagtcaagtgtgaattcgttaccaaagaactcaaggatctacctcaaatctacgacgatatgcacaagggcaagatggtatgtctacgagtgacacgcggaaatttcaaatccagctcattaacaaacggtgctacaataggtcgggagaactgtgctcaagcttcattaacagatcagactgtcgctagaacgtgaatgctgttgtattggaaatcgataagaaccggcaaatcagatggatacgatatgtttaggaccaaacggtcgcgcacattcagggagtcaaacactacggtacgaaagtaaaggggaatacggctagggaaagctgtattgacgtgcccgcaagaagatacgaagatcccagatgctgtgcccgctcgtgaccactctgatctaccatctcttgactaccttggcgggaactccggcgaccaggcatcgactctcgacgtccttggtcaccacggctcctgcggcgaccgtgcctccgatcgtgacgccgggcaagatggtagcgccacctccgatccagcagttctcgccgatcgtgacgggccatcggtactcttcgcctgcttggttgtctcgcaatctctcatccgggtcagaggcgtgacacgccgtgtaaatcttcacgtccggagccaggagtgtgccacgcccgatagtgactagggtgaagggcattgtcaatcggtaagcccaaagcagactcgtagcttctgcttacctttggcctggtcgatgatagtggcattaccgccgatcgaagcatccagcccaacgtgaatattgaagccctgaaccggttcgatcatcaatcagctactctacaatcaatttgacagtcggactcacgtaaccacaacgcagcagcaagcggatatcaaaattggacttgtcctcgggactgaaaaagtcggccttcaaacgctgaacgatagcggggtcacgctcgtcgtggatcgcttgcaagaggcggcggcgttccaacatcagtggaaagggaatcgcagtaacgaaactttccaggggtgggatcttccctcggaggcgccgactgttgatgcgacatggctgatgtatgtttcttgtgattcacgggaatcttgattcatggttagcggctagaagtggaatgacccctgtagtcttatattcgaattctgcgcacccctttgtctcgtcattgaccctttttttctttcaccttcgtcctatcgcctctctgtcacctattgacacgagtctcgaagggatcagcataaaaaggctttcactcaacgcatgacgccttgtcctagacatctttcgcttcttctttacgtcgtgtgctagctgccgtgcgtttatgaaacaagtttcgttttaggaacggttgtgttgcaaacgatgcgaggtgtgtatgcatagagtatgtctgatggaaagagatggaattgactctaatgtcttcgtcgagcttaattgcggtgttgcggttgtccaaaccttgactgtcggaatgccgcctgtatctctggcccctgagtgagagacgtgctgcgtgacgttaccttgcactgactgaactctcggacatcctgataaaccacccaagagcggagatttcgctgtatgcttaccacttcgactcacaaaccacaattactaaccattctttattatcatgatcgcgagctagttcagaagatgcgctcgagcaatacgctcattcttagaccatcttttgcggaaaaaaaaaggccacggcagccgacgtgaaagccttgcttgaacggatcaggccacccaggcgcaaccaagctgcagcggcactattggcttccgagagggcaacacaaaccttggaacttcatatcatccgtcatctcaaggtagtgcacggctataatctttctcggacaccagatgcttcaccgttgcctttcatggggtagcggtcagaccgttgacattccgttcgcctcagagatacattcggggccctggtcttccggtgacatggaaatgcaaccgcaagtttcttttcgcagatgtgacggccacgacactgtatctctctatatgtatttcggtcattcgacaatgcggcggggatagaagaaggtcaaccgcaggtttgaggtttcaaagccttcatcaggcctggactgtatcactggtcagtagcgtcatggggtggcacatcatttccctgcttcgcaaaggactttgatgttttgcatctccaaaagtacagtggtacgcatcagacgggagatcgatcacaaaagaagaacgaaaggatggctaaatgtcagctcgcgcgcttactgctcgacggcgagacgtcgtttcatcgcgtttcgtttggtaacaaacgtagtcggaggctgcgtcataagcatcctttctccctggtcttagtccgacttgaaacgagagaataaagcctcaggtctcgatcatacgacacgcaagacgtgatatcgtaaggctatcgactatgactgaggacttacggactatcgggtttgtcaatgtgaattttattgctgcgcagagctgtagcctcgagtttgaacgggtcgcaagattcggataagaacgccacgtatggtgagtcttgggccgtcttcgtggtgtttgaaccgcagctcatgcatctccctttctcaccgacgtccaagtacctttgagcgtgtcactccgggccaaaggaggcaagaactcatctgttgctgccaagggggtggagagtcttgccccatcccaagcggaaaaaaaggtttcgttactttcctttgcgactctcccaagggaaggagtataagaggacactctgctgcttgattgagcgacgtttgactttcctatcatcaaagactcgtctaaattgatatacggcggaactatgctcctcccaactttcctgtccctcttcttgaccgcgactctggtggtcagcgctccagctcctgcgggacctccttacgtcgcctgcactggagcccgtcaagatggtactgggcaaggctacgcaatgttcaggagagctgcaggccttttccaaggggatgaatggaccaaagtctggggcgacatcgccgacgaagccacgacagaaactttctttcaatgctcagacagatgctggcgagcgggtccaagtgagattcaatcgttgtgccgagatgttgctcgactgcaggaggctgatctcggtcgaacctcttgtagcttgcaagggggtcaactactggcatgatgatggaaagtgttacatgttcaagaatggcgcgatggactttgtggagggtcggaacgatcgatgggtagacactgctgtcaagggaacgtgcgaggaacaggccccgcaattcgctctaggtgagagtcggttgtccgggcctgagctgcgggggaagtcctacggctgacgattcaggagttctggtagagcacccggaaatcacatgctgcaacgtttggatgtagtgatagtcttcgaggatgggaccagggtcttacgcgagtctcgtctgtgttcatattgtgctcatgcccctggagggctcaagatgattataattatcgtagctctgcttatacaaaagcgtctgttcgtagccttcctcacgtctacgaaatccacgggtatcccgctgggaacgccttgcgcagcattgcgtcacgaggtaatgtagcatgcatggctctactgcgcctttcttgacaggtaaacagcctcttccctctttcgctgagcccataaacgtcgccccacattgatcgtgctccagatccactggtgacagaagacgataaagaagaaggacaagaccgggatggctgtttgtcgcgatatcacgaaaggacaagggtgagtcagaacggcggtgaatgagcggtcggtaacgtgggagtcagtcaagacatcgaggaagtggtcatgacccgaaaccgtcgcggacttaccgacataccagaacccgtaatcgtcgtaaggcatgctggtgaaccggtcaatgtcgatgttcataccccagtatcccgtcataaacgtggcggctgttagaggaagccccgatcgagtcaggcgattgattagtatcgccagcatcagagccaaacaatggtatacgactcacgcatgaagatgacagtcaccagcgacaaacgctccatactcgagttggagtcgaaactcattagctgcagagaaacgactcggcatcagcaaatacaacgcacgtcagcggcccggaccatccaggccacacaaagactgctcgatcgcgcactcacgttgaagacgaacgaggtcagatgatcggtcgtcacgatgaactggtcaatgttgcccagaaccgtgtccagatgatcgatcacgtcgctcaagtagatctatgggaagcgatcgaaagaattccgagtcagtctgcggttccgatcgtgtacaagtctcgcccggacgctctcactttggtgaccctggaaatgtaacccgcgctgtcttcggtatgccaaggcgtctcgccgccgacaatctcctgaccagccgagcccaagccgaccttttctgatcgatgtcctacgcctgaatgatgaccgtgatcgtgatccatctcgtgtccgccactcatattgctgtgttcctcggcctgtctggccccgtataacaagctcgccagcgctcgttcttgatcccggtttcgtagcgtgtacagtaccctggccaacggacccagcgttcgcttcattcgggtcaattgcgaggagatgacgtggaggtgtcggacggcttccatctcgggtcggatcaggcaaccggcttcgatcttcaagatttcagcctcgaacgcctgactgatctcgattgcaatgtcgaccactgcgagcgagggcgggtaacaacgttttcacggatcagtcatttgccagtagcggatatgacgccgtgacgaggctcaccgatatccaacagggcctctaacaacatggacgaatccgctgtccgccgcaagatcccatccggcttttccagtcgcatgtagatcggatcgaggatcccgctgtacgggctggccgacatggtgatcagcgtccctgtagatggtcgttctcgtcagcatggacgaggggacgtgcgacaacctgaccatcgcgctcggctcaccatcacgaagcatgaaacagctgaatacggtgcgtcggatgggaaccatatacttggctgacaactggtccacagtcccacgatgggcggggcccatcatcgcctatggacgtgcgattcgtgcgttagctatcgagagaagcgaatgcggcaccgccagactcaccatgggaccatgcccgatcgcctgattatgcaggggttcaaacactccctcgaccccgtccggcaagacgtgaaccttggtgctcgcctttgagggtgagaacgtacgggaccaccatccacgcttcctgccgccacgtccttcgagatcgtccccgtagttgtcttccgagccagcccgagagtaggctgcgtgtgaaccgaattcggaagggtgcttggcaggaaggttgacggcttccttgatctcttcttcgtcttccgcgcggatgtactacgggacggcagattcgtttgtgagcgtcgtcccgcggcctgtgacttggagaccgagacggcgactcacttgtaccagtacctatgcagggcaaacccaccgttacctttcacgtcaatctcggcgcgactagacgatctgggtgcgactcgccgactcacttgagtgtaaagatgctcggcatagaagtcaatcttgctccgaggattgttgttcgcccgtaacgcgtcctcgatcgcgagcggatggaggttgtacttgagcgcgaggactttgatcgtgtcaaagttgatacctagcgtacgtccaggtcaggcaagcgatgtcagtccgggctgccatacggagaataaattgaaggctgggctagcacgtaccatccaagttgatccaccggacgctcttcctcgtcttcttcttctcgtctcccgccttgcccgctgctggactgacaggccgcctcccgctatccgagttgagccacctttccagctttttcccaggtaggtccaccctcgtcgccggaccatcatccgagtaatccacgatggtcacctggacctcgtccttcatctctgcatatctccccgggtcctgggtgacgtcgataccgggctcactaccggtgttggaaagccatcgatagttgttgtatttttccgtctgggatttggtacgggacaagtgtggagcggcgggcatgcttggacgacgagcacgggaagggctgtgagagacgctgggtcgtttgttggagaggacgggggaacgggggatgaaactcgattcgctgtcctcctcgtcatcgtcagtgtaatcgtcccgatcgtcgtgatgcgtgtatttgcgaggtatttcagcgaggtcgccatgttgacgacctgtagtcaggacaagagtagcatcagttggcgccctgaagacccagcttgcctcgatcggagaagtcagtggactcaccatacgccgagttcttcttcatcgacgaggtcggtaccttcgtcgaatgcgtcgagccgtagttgccggccattatgagggggtattattgcagagattcagagggtttacagcgagcttctgcctcctggtggtcaagattgattatgggtgatgctataggaatagtgatagctcattgtcgatgatgactctatcaaagcatccaaaataaatcaaggagtgacgtcaaaagttgattgatgaccgtttgagagacgaaaagcgcgaaaaggatcagctcaaactcaaaatcgtatatgagtcaccgatgccgagaggtagggtcgtgtgaccttgatgtacttggctacaaagtaggacagacagatattgtagtacatttgggacaaccacaacttcgacagagtgagatccgtctcccatatccggtgtcaattccggatttgccaacatctggtgccttgcgcttacgtgcgcccgtgtcgtacgtctctcttcttgctgacgctcttggccttatattggttcaaatctatctattctccccgatatctcagagggagtctggagattcagagacagaccaaagtcacaatttgtgtcgcggatcataccaggctgattgaatgcgaagatcagaccgttctggccatgcgagtacagctactcgatgccatatacatattgactcgatatccaacaagagtttaccatgtggactcactagtacttccgcgccgtcatcaaagcaaatacagacaatgacgtgacgaccgtgccgtgactcgaggcggtgtgcaacatactcgagtagcatcaaacccgccgaatgaagcctgatgacaaaagacctgttgagacttcgttcaagtggaccaggcgaggggaaatatgttcaggctcgaatagtcctacgagagcagagtcagagggctgcgagacgccctgcacaggcgaaggggagcagcaacggatggccgcaggtccgaaccgcgggcacgattaaccttatgccgccggattacatcctggtgcatgattgcgttcgagagaagatggtccgatacgaagacggcctgcgaccgcagggcgatggttctactagacgtgaaagtttaccaccaatcggaaagccctggccatgttcttcactgacgacacgatacaactcatgtcgcgatcatgacttccgattcccgtagttgggcaccttgtccgccgtcgatggattaatgcaggtgtatttcctgaatcgcgaatatgattgacgctcaacacaggtgaaacatgggaaggaaccgacgacatgtcgcctgcaaaagtatagcgccaatctttacgccgggaacccgttgaacagtaggcctagcattgaggccgactgctggtaccatgtgcgtcagaacagaccggctgctacgtcgatcacgaactgcatctgcttcttcagtgccgttctttcttgctgcgatcgcgccgagtactggtcagccgagaaactgctactactacgctcaccaagagaatgttgtcgatggacccgatattcccgcgcgacttgctttttaatggcgtctcgagcttgcatcagagcatcgggttttacacagctcgttccggcgacgatgtcgacgatggagtcagacccgttgatagacatcctgacgtgtgcatgtgcttacgaacatggttactactgaacccacgacaagtagtcatgaacaaccagctttgaaagggggcctgtccaaagtcattcggccggtcctcggccagttacgcgtcgtaacgcctcgattccaccctccatcggtcttcgcacgggagcacgggattgatcgtgcgtgcgtgcgactcgagccgttgatgtacccgtagtcgctatagcacccgtctcgtagaattctcaccacggacacatgtccaaaaaaacacgaatctcgagggaatgggcggtgaaccgcgcaacagaagccggacagtagagtacatgtcgacgacgttcgtggtcgtgaatggcctgagtggtcatgggctgcagagcacaggacggatgctcatcaacctcttctcgatcgttttcttaatccggctgccttttttccaaccgtaccaagcccgaggtggatgatctacgaatacttgaccgcgagctgcactgcctgcgtcgagctgaagctgcagctgcactggattcggtatcaaatacagagtgatcgccctccaccatccggttatgattcctgtcagcagagacgaccaagctgacaacgacaagagttgttgacaagacgggacgtgacttgcatgacttgatcgtgtgcttggaacaaatgatcaggtgatgatcaaataggaaaaggtcgatgacggatctaccggggcaaaaggtacctcgcgactgaaacccctggtcgtcacgccctactgcgggggttgcgtgagtttctcggtggctatcggatagtgcggggtcagtgggtcgaggatgcgggggttcacagaccacagcgtgacagggacaggcgactgtgttcttggcatcacggtacctcttggcgctacgcctcgtctctcggttatacccctgcacgcgcctgttccatgcggggtctccgggtacaatcgacccaattcgggtatctgacttgatgtcaccggggggttcgaacaccggccaaggtcgatgactacagtagtacttatataacacagcgacgtcgcgtcctgtgtcccttgccgacaacccacgccccgttcagacgttaaactcttcacacaaagacgtcgactcgaaaggaaactctcgcccaccatggaccaccacgaccacaaagacaagccggtgatgacgcacatcgagcacaaggaaggcagtcaaaacgattaccctctcgagaatgccggactttccaaagagtacgaccccgtattcgtcaagaagacgatcaggaaattggacattcgtctgttgatcattctcggagccatgtactcgatcgcgctcatcgacaggaccaacctgagttcggcgcgagtggcaggcatgaatgtcgaattgaagttgtaagtggcgcgttcgtcgtcgtcgtcgtgtccccgagagacgcgatcgctgacaggtcggggcggctcatatttagaaacgtcggcgaacgatactcgatcgcgacgctagtctttttcattccttgtaagtcggcaacggaggaaccccgccccgatgcgcttctcaccatcgaccattcgcgcatccctcagacatcatctttgaattcccatcaaaccttctcctccgtaaagtcggtgcccgaaacctcttgtccaccatcaccatcctctggggagtcgccaccctcgccatcgggttcgtcaagaactggcagtctctcgtcggactgcgagtcgttctcgggttcttcgaggccgggttcttccccggatgtgtctacttgttgagttcgtggtacactcgatggaggacccaggtgagtcgtcgagggtcggtatgtcctgtcaaccagcgatctgacgatcatttcgaccacattgcagacccgaatctcgttgttctacctgatgagcatgttcatcagcggtctctcccagatcctcgcctacggtcttattcagatccctcgagccggtatggtacacacttggcgttggatctttgtcatcctcggcgctttcaccatcctcctcggagtcatctcgatcttcctcatcatcgatttcccggacaagaacaagtttttgacggcagaagagaccgagatggtcatgtacatgctcgacaaggataggggtgacgccactccggatcaaatgaccaggggcaaggtcatcaagcacatgacttgttggaggacatggtgttacggattgtgtttcatgaactcgaccttgcccgtgagtttggcgcgcgatgcgtctccgtgccatgcgatagatgctgacgagctttcgatctagtcgtatgcctttgcatactttttgcccgtcgtaagtcctggtcgtcgcgatgtggatttctacatgagcttaccatcgtcgttgcccgtcatgaccatacagattctctccggtcaaggttactcgcaagtcgcctctctctgtctctcggcacctccctacgccgccgccgccatctacaccttttgcatcgccatctcctcggacaagctcaggcaacgtggattgttcgtctgcatcaacgccatcgtcaccatcatcggttgttcgatcatcgggtacgccagcaacaaggacgtcaggtactttggatgtttcttggccgtgatgggtgctcaaggtgagtggtcgcggcgctctggcgagtgcgagtcgggtggaaaaggtatggggaggctgacttccttccactgtcttacttgcttgccgccgcgttcccagccaacgttccctcggtcctcgcctaccaagccaccaacaccgtcacccacaccaagaagtcggtctctgccgccattgtcatcggcatgggtggtgtcggaggtatcctcgcctcgaccgtctaccgacaggccgatttccctcgatacatgtgagtcgtcgtcgagcgccccaaggcgagatcagggtgtctgaccaggttgtcccttgctacagtatcggtctttgggtcaccatcggcgctcagatgttcacgatcgtcttggtcgccctcttgaccctcttcaacacgcgattcaacaagaagttggacgagggccgtgagcctcctatccagggcatcgagggattcaggtattcgatctaggtcggagggccaccaggcggggttcatgtgtgcagagacgattccacaaagagaaacgagaaacgaatcaagtaatccgagtcgagaccggttgaggcgcgacgaggtcacattaggtagtcaaacaaggttgtaccaaaggaaatcatgtgtttgatggtgtgcttttactgtaatgctttcgaggtataggccgtgcgcaggcaaacatgcaacatgtcaatgtttattttccaggaccgtcgaccggcatcaaagaaatgtcctgcacgtcctgaattagacgagcctcagcgcgagcccctcacgtcggcgttgcgtgaacgagtcagagcggaaagttatcccgagtcatctcggtcgaataatagcctgacaagacgtatatgacccacccatctatcggatgatcaggtacgggcgatcaatcgagatgatgcgaaaactcaaacactttaacactccatcgtgaccgacctctacaccatgacatctcacttgaactcgtaccaacctccgggtcctcctctggacatcccattcgaatgccacttgaacaccccaccggatcgctacgatcacaacttttcgggtggtccggtatacaccttgtcgaccgaccgattgacgttggtcccgttcgtccccagtcttcatggcaagcagtactatcacgatatcaaggagcacggccacctcatgaagtacatgccgtatcctcgccgaatggacgagagcctggacaacttgttgttcgtatacgaaaagaccatcaggagcttgccggcaagtctggattgtacttggacatctttccgcatgactaccgctgaaccgtcgttgctgctcgcagggttcctgcttgtgggcactgttcgacctgacaaaagtgggcaataccgcggtcgaggatgtcgggagcatctgtccattgccccaaggtcatccgcctttgaacacctttgctggggtcatggggatgctcgtcacggatagggacaacctggccagcgagatcggtaagtcgcgggtcgaccgggaaaggcaggagtcgaagcaggagtcgaagctgagatctggatggtcgtcgtcttcgacaggccatgtgatgatcctccctcgagctcagagaagccacgtcacgactcatgccatcgctctcatcgaacattacgccttggatcatccttatatggccaggtggtccgttgaaaaggaagaattcgtcgctgaagacgtaccgggcgatcaccctccaccccttgctgcgccgttcgacgccaactacccggcgccccgcggtctgggtctgcgaagacttcaatggcaagctcatcacctgaacgatccctcaacccggttggcccagcgtatgatgttgcgagaagaaggaaggatccgaatgcaacggatcgctccaacaggaggagaagagggacgtctacatgacggaggtgcgacgacaagtcggacgagttgggtcggagcgctcacctggagagactgggaagatccagaagttcagaagcatatcaacgcgcaggtggcgaggcgttgacggcgttgcaagactgtgatgcgatcacgattgtatggccgcaaagttcgtatgatatggtggtcgtaaaagttaatagtacaaacaaggtgggttccaattcatccagttcaatcgtcacgggccgtaatcaagtcgttcgtgttcttgtgcgtttcaaccggcgtccactcgcttagcttggacgggcgacctcgaatccatgtctcatcgagtccaggcgggttctcagtcggcggtcaagtcgaccgtctctcccttgatgaatacgggcggttccggttagcttggcttcttggcctacaggcgtgtatcccagcctctcccattcgtcccactgtcgttgctgcagtcataacagcccgttgttgcaatcctcgtcccgtcccttgatcatagggatgatcaagttcagcccgttcttgacccctcgcacgcatgcgatccattcgatcgttgacaagttgatataggtgcagtagttgagatccaaggccaattgaagggcgtgataatggccgattccagcgtaaagagagagcgtacggaatccgttctccaaccgattcaacgaggccaaggctgcagggatggcagggagggatcgtttcccagcaggaaagaagggtacgtgacctttcatgaaagcttcgaccgaggccacagcgtcgccgtagttggtacccttgttgtaacccttatgtggacggaactggtaagatccggtaaagtacggctcgtttggcctggcgacctttttctcacgaagaaccagttcgtacgtcttgtaatagtatgtccgccattgaatgtcgccgagcttttgagcgagccagtcccatgtggcccgtttggtgaatcaccagtagagattcactcggaatgtttgttcctcgaacgtaggaacccattcaccctcagagtcgtaacactggtccaggcctaacatgcggtactcgagatcaggttcggtattcggacggtagttccggatgaccttgttgatgaggaactggctgtcagcgtcttggtgccggaagatagtactgatacgtaaagcgaataaaggatccagtgaccaacagagcgaaggatccttttcggcctgatcgtccaccgtcaacatcggagggacaccttctttccgacgttcaaagatcctttgacgctccgccaaccagtagaaatcttgatgcagatgcttgatagagaggagttgtttattcccaccgacctgaatctcctctagaggacccaaggcagacctgacctcaaggagttcggacttagtaagaccttaaccgtacggatttagatcacggtgatgttccaccagcggtaccctttccccacctccttgaagtatgacctcttccccatcgctatccaggaacaccacagtgaccttctctagatccatcgaagcatctgaagtagctcttgttctgacccgtttggctggccgggcggtgtcacatgacgaaggaggaaagtcggcacgtctgcgtggtgtcaaaagcgggacttcgacatgagagagaaagaaccgagggtcgtcgtcatccgattgcatcgtcttcacatagatgtggtgttcctgcccctgctacagacttggtcggatgacaactagaggtcgaacaagacaggtaatcctgatgtgtgtggttccaagttgaatgaaaccgtcaaagctgtcgttgatgaacctcgggcaacgtcaactggtcaacgacaagtccaaggtcagttcgactacatttccgttgaaatcatagatgatcatcatctttgcggaaaatcatcgtggagggtacatcacgactcggacaacgattcaagagacgcatggataggtacaattggagccgacacgctcagcccagctcgatcgtgttctacggtccgtcatctcgcagcctcgacgtccaaacccaggtaccttacgttcggtccgccgagaaccagttcaacgcgatcaagctcggttcgtccaggttgtgatgctggtatcctaagatagacaaggcaccggcatcggccgagatatggtagctgcgacgagtaggcgattgcagaggagggatcagctggggggagtatcgcgatcaagtcgagcgacgacgacgtacccggtctccaaaggccaaccgcaccatcgcacgataaagcatcgggaaaagtgaccatgagagacgacgacaatgtccttggcatcttcacccttttcatagcactacgggcgaggtcgggtccgtcggcgaacccacggcacactggacgaccgctcgatgactcacctcgcgatgcctcgacctgatcttggcgatgaacccgtccacccggtccttcatctgctccggagactctccacccgggtgttcttcgctgggaggacacccgtccgtccagatccaccagtcgggtttacgctgcttgatctcggccgtcaaaagaccttcgtacgcgccgtaatcccattcggcgatctcttccgtcgtctcgaaagggaccgaggtcgtggtcttggggttgtccttgaagagctgcgaggtgggtcaagggcagggtcggtccagagtaagcgtggatgcgggcaaaggagggcggggaggggactcacgagttcggcagtcttttgagctcgttgacgaggagagacgtaaaagtgggcgacgttgctagggtcgatgacgtctacgaggagtagcgtttggaagggtcgtatgagtgaggtaggacgttcatattgatacgagttggtggtcaagacgtgggtgtgaccagaggccagaggaatcgggagatttcgatgaaccggccagaacgacacaaagacaaacgtgcgtgatcagccctcgactcccgaactcccagccagctcgacaatcaactccaagcccgcatcgacactcacctggaacgaccaaatcggccgttcgtttcatcgtctcaataccctgctcggtcaaggggatgtccgaggtcccggtctgagtgggatcgggtccgacgtggaggtgcagaggttcaggtcgggagataggtagttgacgacgtagccggcaggaccatgacatgttatgaagagtagacgaacaatgagaggatgattcgataggaccgtaggaacacgacttacgtgtcgacctgagttgttaaaacgggatgacacgtcgaggtgacaacagccaacgcatcgtcagcctagcttaaacgcggtggcttcgaatgtcaaccggacttgccattgacagaccattcagtctgacctatgtagccccagaggcatgttaagaagcgttccgggtcgcaacgtcagccgactgcatcgtgtgtgggtttcgactgtcgactcttaccgtgtcgaatgaggtatacgtgaggcatgcgacccatggttgcggattttcagctagatcgaggtcttgtgcttgatgtctagcgttttagtttgagctgggtacgagtacgaatttggattgaggcggattgcagcagttcggaaattatacggaggacgacatgattttcatgaagatatgagcaattcggttgatgacgaacccctaacaacgcggataacgacgacgacgtcatcgtgagaaaaaagcaacggaagagggggaacaacatgtttcgtcaaacaacttggttgcatcttgagagccgatatgtacctcgctatacatcagggagaaggaggacacggtagaggatcaggcaggcaagtcgacgatgaggtccccggtcaaacgctcgtcaccacgtcatcgcttgacccgtccttgtaatccaaaatgtcgacgcaacgtatctctccaggtcttttcgcagtctaaatcgggtatccacttagtacagggtagatgacgatgagctgggggatcactcacctagaggtttgcggtacagactctgatcctcggcagccgcgtcgttgacggctctggccacgtctgtccacctgcaatgatcacgatcaggaatcagctgacctcgcagcatgaccgggagacgattcgcaaataacactcacttgacgacgtgttcacctgtcgacatcgtttccgcccaaacgacccgcttctgctcgctcgtccaggatttctccgatgttaccgggccggacatgtcgggcatggacatgatcaactgatctccagcgaactgaccgtccccgtttgccttgacgaatccactccagtgcgtctctcgcatggcagacttgacgcgggtcttgctcttggctagaccttgcgggttggccgagttgacacgctgggcaattgtcccgtagtcaccagactcgtagcccgccgtgtagaggcaggaaaccatggcgaactgctgcgcggcggtccagcgtgtacggcgagcgggggaagcggatcgattcggagcgggtggactgggagtgacggggagagagggagagcgagcgggtgatgaggacggggcgtagacccggtcgtcgtcctcgtcctcgtcatccgactcttctttcacatggacctttcgcttcttggtcggggattcgatgacaggcggaggctgagacgaagaatcagctcgtcgttttctcggcgagatgtggacgtttcccgtcttgatcttcgtgtccgattccgagtccgacagcaggatagcctgaccgaccgttcgtcctgcttcgtcgccgataaataggtccccgatctcgagatcgacctgacgctgctgaccttgatcccgagaactgtccgttaccgctgccgtctgccgcgagatcccatcgagctggggttgattcagaacctcgccttgatatccctcgggtacactataccccatgtccacgtccaactcgtccgacctagccgccagccagacgaggatcaactcgacatcaggtacggtcatccattcgccgtacccagcctcattgatcacctcttgcagagacctgtccgacttggattcaatatgtttcaggctgaactcggcagcgagaacgaattgttcgaatctagggaaggcaatgtcccgcatcaaaatttccggacgttcaccaggatagaggaggtgcgagtaggcgatctccaagtccagcccgctccacccgggtcgcacacagacgaatttggccgcattgctaggaagcgggtcgtcgagttcaactacatcgatcggggagaatgggtcgggacccggttcattgtgaggctcgacgaccatgtcgggaggttgcggagtccagagaacgacttgacggtcagccatgatgttgcgttggtgaattgatccatttcgcacgacgccccttaggcaggtagatgattggattggatgttatatctcgagatggagctcgtggcagctgttgcttctcgaaagtccagatgatcgtcgatgactgaacaaaaggaaagacgatgatgatatcgaggatgatgatgatgtcgatgacaagaagctgggttcgatgtcgagatcgtcgtgagtcacgtgactatctgaaccccgtgacaaccttgtcgtttcaaactcaacattattattgtcgaatccactgcaatcaagcacaggcacgttgcaatggatgtaacctagcgatagtgtggaaatgggtgatgtcgttaatcagttgaggtggaatcgccgactgcgcttgttgcacgtcgaaaccgcttgtcaatgacgagtcgcaacgaaagattgacgggcaaatctcccttcgtctcggtggctgtatgcaacggtacgataacgacaagggccacatctgctggtactcgagagttcccctcactcggttttttgagatgaggtgataggtgatcgttacccgtctcctctcgacgccactcgaagtggaaaagaagctgttcattcgaggagaacaatgtcaaaccgtggatctttccctacggtggtggaggtacgtgtctcaagactggtctcgttaaaggtacgacggagaaggagggatcttgacgactaccgcgcgattctgttgtcgtgaggtcgacgccgacaacgatcattgccgctggtactgtcgttactgactttacagcgccattgctcttgcagctggaattctctggtggtatccctcgagcgcaacggaacggtatcattcaactttgacgcgctagtcgtcgatgatgcggatgatgtcgatggcgagaaatgatttactcgtcagtgacatccgccacgaccgctggtcctgaattgatattgggtagatggaaggcaaaagagaaggctgccgtgatctgtgacattttcgaggagaatcgaggtgaaagtagacaaaaaaaaaatggactctctgttgaagatattgcgactggacacggccaagatcgcaaaataagcgcgccttcatggcccacaatggatttgaacgggtgccaaggtgaggggtggcaagtgcccatcttgcaattaagttgcggtcatgaacggccactaagtctcatgacctacaggtcagtctagatgatgtcagccgtctcgaagatgaaagcgacccttattacctcgctctttttatcttgggaaaaaccaggcgacaacgaagaggaaaaggcttgtgagagagcaggagatgcagtggtcaactatgaatgcaatatgtttactaccatgttcctgctgtcccaaaagtcccattgccccagtcctcagtctgtcaagagattcaactcttcatctgtttcgaacaaggtcagatttacaatcgtgtttcaaccctgatacatgggaatctgatgagcgttgaagcaaggcgttcttctcggatccgatggtacatgaattggctagccaaccaaacgttgggagccagtcaaccggcatttgacatgctacgtacgtcacgaagggcggcattcaccgggcaggccgtcgtttgaaatcacccgtgttgacctcattacgacgtgtcggacgatggaagcacgttgtgttgcatgctctgcgtcgaggatttccgaggcggcgacatttcctttcccgacctcggctaccgcatcgaacatcgacgaggagatgtcatcatgctcaacagtcgaaggatcatgcattacatcggcgcattcacggggactcgcacggcgattgtcgtctttaatcatgcgtcgcaatccaacttgctcgtcaacgccattgtcaattcggaggccaccgcagacacgggttgagcaccgacatttgtaaagatattataacgacaattatgatgacgacatgcaatctatttactcggcgtgagtcttgtggccacgaccgcccttgttcttgccactgctaccgtgaccatgatgaccacctcgaccacgacgttggccgccgccctcgtgaccacctcgacctcgtccaccaccgccatgtccgccgccgccgctaaacgtcctgtagtggcgtttccattcgggtgcctcggataatggctgggcggggtagtccagtttgctcttttcctggtccgaaagtactgtcgacgggagcgtggtcagccagcatgtcaccacaacccgactcgaccggactcacaccagggagtctggacaaaggtcccctcgacgtctttcaattcgggcaaccacgtcttgacgtaattatccccaacatcgtacgtattggcctgcttgatcgggttgaattgtcgactcgcacgagcgtccaatcctacaccgctcgcttggtactgccaatttccgctgttcgaacacacgtcgtggtcgcacaagagcgtctcgaaaaattcggctcctacacgccagtcgatgtagaggtcaacggtaaagtacgaagcgacgttttgacgcattcggttggacgtgtaacccgtagcagaaatctccttgagagcggcatcgagaaaggggacaccggtcttgccttcgaaaaacaacctcgccttgtccttggggtcgccgaggttaaacgacttccactcgttgatcgtcttggcgctttccttgggtttgaggacttcttggaatccgcccaggttgaacaaactcgacgccgtgccagcttcgccgggtgccgggtcgtctggagtcatccgccgggatttgcggagacgttcagtgttgaacgatcgcatggtgctaaacttttgagacacgtagtagaagtagtctcgccagagcagctcgaattgaatccaatagacgttgccctcggtgtgcttgtccagtttaccctcgttggccaggctgccccagagtcgagtcagtctcggttgctgtatgaccacccacgacaaccgcgactcacctcgccatcaactgtccgactcgccatccggcatacctcccgctcatcgtcccgttggccaaccaggcgctaaacttagtactaaacccttcgcccaacaacccgttcctcgtgtccttgtagttgcgggccttttcacctccctcgaccttgccgtccgagatgtacctgccgaggtagtcgtccaacctcgccaacgccgttgtctcgcctcctttgaatgggaatgccgatcgcgagtcgtccgaggggagtcgataggattgccattccgagtcgttggtgggcacggggacgggttggatggggtcaccgatgtcgggtttggcgagtaatggggccaagaggtaaggcaggagcgcctcggtcgatgcaaggttgtcaggaacgacgtgcacctcgtcggacaagttcagtttgggcgacggtttgatccgggacaaatctcgagccggttgcctgatcatgtcatcgccaaggccttccacttgctgcgacggtggcgagccgagttagtgacgacgacagtgtggagtgaaccgggggactaaccttgcgatacgtggtgtagaggtcaggaacgtcggcaatatcaaaaggtaaatcttcgggtgccaccatcggtttcgaatcgaccaatttcaagctcgtgcccatgggctccaacaaggatcgaagacgacgctgaaagtggacctcttccgtgctgacctgcgaggcgaggttcgtggtccggtgtgaactgcagctccggcgttgagaaacggggactagatacgagacttacctccttttgcatccacacttcggtaacttcatacgtctcctcagcatctcccttttgcaacgattcgacgatcttgctgacgacgctctccatacatccacaggcgaccaagaggtcattccccttatccctgtaccgagatttcaggtcgaacaccgattcgacggtgaatttggtacggtggcgaccagtcttccagaatttacccagccgggtgcggggttcgggggtgacagtttgagaagatttggagcgaggcaagtctcccaatcctcgaatggtaacgggtcgatccacggcgccttgctgttgctgctgctcataacctggcactgcagacaacgccatgattctttcatcaaacacgtagatggggagaaagtgagtgaccgccgattgctctttcgagtggacatgaccgagtacgggagagtcgtgggtgcgtaggtcgttgtaatgcagctgaatgatcactttggcagaggtcgacgaagacggcatcgttgagaggtgcctagtggcaggcgtgtggtagcacttggcggtggtcgtcggcgagtttgatctggatgataatttgatgcagcgggtaccgaattgaagtagcatgcgcacaattagcgagtagatagatgggctcgtgatgtcgcttgctgacctggttgccgacgtttgttggttctttacgacctgcgttgctcgtcctgctcgatcgaaaagatgatcgatcgagatattcatcatcgagagtttcggaagcaaaagtcacgtttctgtcgatgacgtacaaggcggagaacgacgttacttccgagggttactaacctcgagtcgtttggcatattcatcgaatctaggtttgacaggtcgtcgtcgagtggttgtgatcagtagactggccgggtcatcagtgtagaccctgtcaacacaaggtgaaaatgctgctgtataccgctccgttcgagtgtaagaagtggttgttttcaatcgatgtcggctaacgtgtctgataggtcgtcatgtacttgtcagcgactctattctcgccaatagagagatgcgaaggtacaatgagctgagagtaatggtcagagatctggttcgataactcggcagtccaaggcttcccagttgtcaacggaaggggacagcgactcttttttagatgcagctcaatgccatcgtctccctcgatgtaatactgcgacagaagcttcacatagacgcatacgtgccagaaaatggtcgttgttcaagcaaagaattgtcttgaggctccgtagctgtcaatactagcaacaacacccgttttccagaagacacgcatcaaggtggtggtccacttcacaagcgtcgatggagaacacccgatgctctggattggaaagtaggcccggagacagaaccgccagatgaccccgagcatcagaacagagtgtaaggcagtccagcagcaactcgtgtactgcttggttctcgtcagggtttaatagcatggaggacgactagcattcgaatgtttggcgaaaggacggtgctcgagcgagatttagtcaattctccaaccacactgcttttggagaaccataccagcttgctatcgtcgttatcaagatccaggacgatttcgttgtgatatagggagagggtagcggtctcgttgtgcagcccaacgccgagaaagtacacacgatcgggtcacatttggattgtcgatcgagagagcacgcgaaagatttggatatttcgtatcgaatgacgcttagtgtataggtctgtatactgaactagctacaagtgtggatccagcttcaagacgatgttcgacaagacccgcgagcgtcaacggccagccgttcctgcaccaccgtcgcctcacttcgctttcaaaccctcggcgaagtccttgacggcatcctcgtatccagtctccctgctatccaccgtgaatcccagtgcttcgacagcggacgaatcgtaatccccggcccaggtctcgcagatggcaatgacagcggggtcctttttatacgaaaccagcgacgtggccttgtcacctccaaatttggcactaccacgcgttcgttagtgcgtgtccagtacgctgacgtccggctcctgactcacagggcgtccaagatgaccttggtgttgatcttgatcccgggcaagttgacggtcctcagcttgccgacgccacgaacgacgtcaacgtctttcaagctcagggcaaaggcaatgttccataccaccgtcttggttcgcgtgacgtagatgcccatgtcctcgaggatcgggtcgtcggacgacgaggcgatggggcagacggcaggcatgccttgaagaggttctcggatgagcgaggagatgaaggaggaggctgccgacgatggtgcaccggtgcgaacgcagaccgtagggagacgaacggtcctgccttcgagaaagcctgccgggtcgagcgggatcagcacggaggtcttcgtggattccgagggcggacactgaccttttcgagcatggtcgtagacgatcatttcgacgacgtttttgcagactccatagctcgtctcggggatcaacggggtgtctctgcgaggtcggggcgtcagcattggttgtggtattgcagaccttactcggaggacccactctggaatgactttggatgccggggtcgctttgtctcctccataaacggccagactgctgacgttgatgtagacgggcaccttgtcggcttgatcccgggactctgcgtgtttggtcgtggcggcaatcaagttgagatgcgagtagaggttgatggcgtagcccagagtaaagtcctgctcggattgaccggacatgatgccgctgaggttcggtgtcaaaatgttgaccacgtaattagcctacgtacactggtgtcaatcgacacgacttactgcaacgcgaaaaccccttgaactcgaccatagtcaaagagcttggcgacctgctccttgtcacccaagtcggcggccactgctaccaatcggttctcgtcctcgacgccgtaggtaggtggtcgatggatgtcggtcgtgacgagtcgcaaccgaggacactgttcgagcaacagttggacgagttctcggccgacaaaaccggcggctccggtgatgaggaccgtgtggatgtggtctggcaaggcgaggctgggcatgatcgcgagtcgagtcgattgactgtctttgtgatagacgaggtgcttggtgaataggttgttgttatgttcgaaagatcgctttttgacgacgctcgctggcgggttcaccggcgttcggaaacgaccggtccggggtttcccggtggattcggtgacgtaacaaaccttaaaatgtcacatattcatagagacgtcttccgaagacattttgggtgaaaacacctgggacaacgccatggaccttgttgcgttgagactgggtggcagagtaggtgatgattcgcttagatctcaaccgagacccttttgaacaagcaggatcgacgctttcagtgttgagctggaaaccaaccggtccattcgctttgaagagtgatgctggttgatgcaaagccgccaggtgtcacagggtaactgaccctgaagctcagtgtctccggcgttcgataatgtgttctccgtgccttgtccatgcggtgtaacgctgctcgaacgtcgattcgtgaaaatcggaagcgggctaggttttcggccaacgaaaggtcagggacaccgcacagaagctcctacgtgctaaccaagtctagctatgggccagaggaagtgtttgggagctacttcgcctttcccatctcgtcccggcgtcaaactatcgtaattatcatctcgtatacgtcatcaaggcgagagcccggtctacaatgtctttgattggccttcagtccaccacgagtgcctagctctcgccctcgtccttcttccacatctccaaggcctcctcgagatgtaccgcctcacccaacctcaatccaaagccctgcccgtcttgcttgctctggcaaaagtctcgccgggtgaacgtggccacgtggcgtgcataagtgaagctcagttcgatcaggacctcgctgatactcggtggcaggtgatacagctcgataaaccgttcgatggtcatgtttcgataataccgggtggcaggcggctcgggctcgagttggtattcgggtgcgggtacttcggcgagagcgaccggtgaccccgcggcctttctctttctcgtggacgatggcgtggcgatcctaaggtcctgcctcggtgttgacatgtcgggtggtgctgaactcgaaggctcggtgaaggatggtagacggcggctgctcgaggtggcgagtgagggaaatacgtgattcgtttcggccggtacctttaatgacctcgacgacaatgaaggggcagcagcgaggcgagccgtggcagacacggcgtctgaggagtctttgcgtcgcctactcggagacttggtcgatctcttgggtcgtttcggagttggacgtcgggtcgatttgaacctgctcgtcgatctggtcgacgtggcgcgttcgtcgttgtcgtcctccaactcgtcctggtcgtcaacgccggcgagagtagcagcccggtttcctgaacgacacgctgttcgttcgaccgtgggtttcgataaccctccaaaggcaaagggaaacacgccgatgtcgtcgtccaacgtgaccgagtaactgcgacgtcaatcagccggtgtcgtggattatgtcgaacgctgaaactcactacccggccctgctcggctctccacagaggtgactgagtagatccacagcccactgacgactttgctcggtattcggaggcaggttgaggtacagtgcatcgtcgtgattgacccgatcaaacacgtcactcggtgttgtccatcgggacagcctttccgagtgtgggtggtgacgatgtacatcatcgagttgcttggcgattttgggcaacgactgcgatgcgtcgatgaggatcgggtggggtaaatcattgggcttggggagcataatcgagtgatgcatattgcatttgctcgaacatggccaacgccgagttacaaagacggggagccgagtgggccgggttacaaaggcggaaaaccaatctacaaaacgtcgcccacgcctcttcgctattgtgccgttgctggaggatatcccgaccatccaaagtcttcaatgttgggtaggaaatgctccgggagcctgacaagagcggacgaggcgttagtacaaaggttgaacgagcgatgaaagtctgacaccgaccactcttcgaaatcttgcatcaaatcggcccaattcaattgtcccaatccggaagcgtcgtccgccaggtcctaccggcgtgcaatcgtcgtcaatgtactgcacaccccggagctgatctcgccgacccacctgttgaccaccgtctgtacccccttcttgatcgcctcgatcgctgacgatatccaacttgcctcgagccacggccacttgagcgagatcggcaaagaacctcgccgagtacatgatcggtcgactcttcttggcggcttcctggtagacgccgctcaagtcggtcaacacttggaccacctcgtctgccatgtgatccgtcatcccggcgagtttctacgagcaagtccagcgtcaaggtcgggcgtcaagcgtcaggacgagattgcctagtgcgacctcgacctgaacccaccttggccaacaggtacgccgacttggcgatcttgaaagacaagacgtccggggcgtataacaagatccccgctggagccaggtcgctaatgacgaaacgcaaaatctccaacgctctcgagagcatgttggcgaacaattccaagcgtcccttgaacgccgtcacccgggtcatccattcggtaatgtcgaattgggtcgtcaggttgtagaacacgaggaagatccgtgataccgggtgtagaggggcaggagctgcggcgcagggtggcgcgaattagcgacagcgacgacgacgacgacgacgacgcggacttgcgattactgtcgagccaacatctggcccacgcgttgctctcgttttgtacattgctggccaggaacgacgacgtcgtgttgtccaactcggtagtgcccgtgccgtgcaacaagtgagcaatggcttcgctttgagggtatgaagcggcgagcattccgtctgcatacgtgtagacttgtggatgatcgaccagccattcggggagttgccaaatgacctcgacgccgatcatcgattgggtacggccgtgcaacatgaacatgctggcagggccatggcgtcaacgtcaacgtcggccttcaaacaccccgcgccaactcacgtccgatcaaacaacgccaactgtcgaaacgttcgctccttgttgagttgttctcgagccgcgatcaggtcatctggtagaggtctgaccggggtctcgtgcaaacccaactcgtaagccgccctgcatgtcgtctaggtcagcaccaaaggtcatgttgacgcgccggatccgggactcgcctgatcgcatagccgactctcaaccaggatcgatggtccgtggcctctttccacacgctcaacaggctcaacgattgacacatgccgatactgacgtccccgctcatgaacgcttgcgcgaggaggatgttggcgcattcgaaaaagtcgggatagacgtcggatcggtagaccatggtcgttaccgccaggatcgtgatgtgcaacagtggagaggtcgtgaaacagtattgtggggtgtgcagctcggggtccaacaaggcgatgtaggcgttcaggttgtcaaagaatctgcgggagggttgtgtcgtcaggggtcggcttgggcgtcggtcccggtcgtggactcactgttgatagaggacatgcacgtcgtccccacgcaaccacttgtcgaccacacgttggaccattcgttttgagagatctcggtcggtcaaactgtcgaccaggtgatcgtactcggcgtctatcgaatcgcctgccgagtcgagcttgcgtttcttgcttgcggccggaccgtcgtttgtgccggtcgttctcaccgcactgtcttgacgaccggacctcgacctggactcgctaccgacctgcatctctttgagcgtcgtatcgaggtccagagggtacgccgtacgtgtcggagggaactgaatgtcattaccgtcgagcgtacgatgtttccacacgcgatgagcttccgggttacccaaccgtgtcacacccgaatatcccgttcccgaatgcgaggacgggtgcaggatgctgtccacgggagagtgcatcgacaagggtgaactgatgtgtgacctggcgtcgaaagggttcagcgtgggtggttgtgggttgatgggcgggctggtgatcgggtaggctcgtgggatggtcgacgacgacgacgcagcgttagtaatggcaggtcgttccgccgggatcgtcgcagggctggcagcattccgaccgagtcttccctccaagtcttcgatcttttgttgcaaggaacgaatgtagctggtcgtcgagagtctataggcggaggatcagaatgggcgggcaggtgatgtgtacgacgtgcgacttgctcggaatagacgcaggaagttccgagtcgaatacagcgctgcaattcaggtcaacgtcagctttggggtctgtacctggttctggacacgggacctacgtcacatccttgaccttcgttggtcacgatacatttcctctttttctccttgcatcgatcgcatgccgtcgtcgtgcgtttggccgcggtgtccactgggtccatcggggcgactcaagggtcgaaagatgctcagggtcacttctagctaggtcttggagccgcagaagcggtgtttccgttgtcagttgcgatgaaatgtatcgacatggatagacatccagttgaactttggtttcgagcgaaaggtggaatttcggaatcaaatcgggagttcaacctggcaactcgatcaagttgcgagttgaaagttgatcgttgttgttgatttaaattctctgaagtcggcaccacgaccgtacatggcatctaatagggtcgctggtctggtcaagaacgtctctaagaagatggacgtgaaaacccggagcaaaatggcacagggaaccggtaagtcgaggtcggatctcgacgcgacgttcgtctcgacctcctgacgacctcgttcgttgcagccaaacgtaacatctcgcaggtcgatggagtgagctcaggttcgggaatgaagcgaggtgagtcggatattggcctcgcgagcccggtggacgttcgattatagacgcagaactgacgttggagctcgctcaaattacagccacgacctcgacctcgagtacgacttcgacctctacttcgacctcggttcatccgttctttcgacctcccgagcccgggtcatcgtcatacgtcaaggtagctggaccagcgaccctagagcactacctgcatctcgatccgtttggcacgacgtcaacgccgggctcgtcaagcagctcgtcgatatcgtcggattcggtgccaagagccgggccatccggttccacgcccgccgcttccgtcaagctagcgttgtgcgatctcgacgggtgccttatcaagactcggggcagcagctcgtggccaaagaacaaggatgattgggattggtggtcgatgggagtaaagagaaagttgaaagaatggcatgaagatgggtgagtttcaggtcgtttgtcatagttgccccggctaatgaaaggtagctagctaccatatcatcattatttccaatcagaagctcacccgtggcgatggtggactgaggaagctcgaggaatggaggaaaaagatgccaatcatctgtcgagacgtgggtcgtcgaggttgtcccggttgtcgttgtcgacatcgtcatcgtcagtcgtattgacccgagctgccgaactagctgccaaaggatatgccactgagggttctggcagcaacgggggaggacgaatatcgtaaacctcgaatcggaatgttggatgtcgtcgagcggatataccgcgatcgaggcgtcgttataggtgcgtctcgaaccgttgcagccgttcaaacgaccggctcattgatttcttgcacctccagacacctcccggtcgttttttgtcggcgacgctgcgggtagaccaggggatcactcggataccgatcgaaaatgggccgtcaacgccgggttgcggtttttcgtcccggaggagatgttcaagtgggtcgcgtcaggatttttgcgtagcaggtcgactgataccctggtcgtgtcgtgaagaggccagagtacgctcgtctacccgccgttcaaagggttcaacgcggcggcctacttagagacgtcgacgttgcgtgagtcgtcctcgagagtctttttcacgcaacccgtcgttgattcggttctggccctgaaccaccagttccacggatcacgccgacatctacgccggtcctgccagtcggatccaagcgagaaatcgtcttgttgaccgggtatccgtgggtcgcgattcgggttgtcgttcgttgctcgccccggctgacacgccgtcgtcgaccagcgcctgtggcaagacgaccttgtacaacacgtacttcaagccctggtcatacgtgcacgtcaatcaggacacgttgaagagccgggatcggtgtttacaggtggtgcgcgatgtcttgaaaagtggcgatcgaggttgcgtcataggtcggtccgcccgcagagtcgccccagagtcgaccttgacgacctcgctcgcagataacaccaatcgcaacgccaatactcgcggtctgtacatccggctggctcgagaattcggcgtccccatccgttgtttctttttcaacgccacattcgagctcgcccgtcacaacaacgcttatcgggcgtgggtcgccagggacgtcaccaatcatgaggtgtgttgcaggccaggactcctctacgtctccaaagctgaccctcgcttgttggcagcgccgagccatcctgccagactcggcgtttgcgtcgttcaaggtcgacctcgaagaaccctcgccgtcggaaggattcgatgaggtcaagatggtcaactttaggttcgagggatacgaagaggatagacagaggtggtgtcgttggatgcattgaggcgcggtgcgagcaggatgaactattgcgtttttttaaccctcggcttgtcgttatgaaacggtggtttcacatcgtttgtcgttttcaaagcggtcaagaccggtgaaaatgatcgtcaatcgaactgccggacaccgattcatcctagcacctcgtcaggggtagcctacgtacctttgtcgagttgaaccgacgtaattgttccagtttcatcgtccccatcgctttattgttcgaacaaacagctggttgtttttgcttccggacgtcgaacgaaacctctttttgttacaagtatcgtcgtcgttttcatctcaatctcattgaactcgacgttgtacacccgttcaaaacccagtcatcaccctggatggacctacgatgccagacttaggggttaggggttaggggttaggggcatcttcaagacgtattgtgaagaggttacaacccaggacactcgctaagtagtagacgtctcaccgttcgtactgaacaagctttcgatcctagctacctatagcgacattacttccttatccgtacatcaacccggattcgtatcatcccaaccgaattcgcttccatcaaccaaactcggctttgctcctgttgtgactacctacgatccgtaccgacattgccacttaggtattcattagacgcgactcagcgaagctccgccgtaacaacggtcttggcaggtatgtccaaggactaccatatcccccaagggcaatgcgtggggctcaaaactgcacaagtcaaccccagccccagcctcgggagccctctataacccttagggcaagccgagattatagaaggagttcatacttggagggacgatctgggctggtgggaagaggccattgtacccggtctcgaatttgccctggctcaaccgtaaatttgggtctcgacccgcgtgtcgagcgacttatgtttcgccgacagagattgtgccgtagttgtcgcgatgtttgggtaccacggttgcaaggcccaggcgacctgaacagaggttccacgtggattcgccctcgctacaaaatattggcgataggtcttgtgtccgaatcgccgccccgcggtccaagctttccctagttcagttgtttactgggctgctcggaaacatcgcacacagccgacacccagtctttgatcgctaagtctacggcagacgaatgacatgcaagagctacttctcgaatcaaacaacgaagatgggcggtctagactggcggggaagagtatcgtttccgcttggccgtttgtcagcttctgcccggtaactggaatgcgacgagggatgtagcattgatagcgctagtcaggcacacatcgatctgcgtatcggctaagcggggctctgtcatcgcactggcaagggggacgcttctcgtactgaccagggagggaggcatcaaaaaaggtctcgcatcgagggtcacgagtcgattggtctaacgacggaggaccttcaggtgatcagctccacatacctctctctagaacccggtcaatcgcgacttgcctctactggtacatgatctctaatgacccctgcccgccgctgctcttccattccctcgccctcgtttcctttcacgtcctctttcggctccaccttgtccctggttgtcaccagcttctacagcgtcgtttcctgcactcccttccggcccatcctcgtcgtaacctcgcttcgctagcctttcaagtacgtccggtcggtccccatattccatcagtcgcaggcggatcgcgtagcacactgagaatggatggagctcggcagacatacgatgaacgatgacgactgcacgctctcacctttttcgatctttcccagactttgctcggtgatactttgcttcttgccgagctctcgcacatacggtaatgacccgtctaatccggcctttaaatctcgtacggtcgtgcaggcagacaaggccgaagggtagtctcccgtgcttgagcctgtcgatcggtgatgaaagtgacagacatcacggcgggtatgcaaggacggagcgcaagacaggttaggttgcgagaccctcgacggcgctccttcgagactcacaattggtagcataacgcatgagttccccagagagatcgctgatacccaagacgtagtcttccatcgagatctcgaatggctaagcgagtgcaacccggacgcatgcgagaggatcttcagcttcgtctacgagcccatcgagaggcgaggagaactcacaggctttccctcggttgacagcgatgcacggatctcgtccacggtgatgagcgagcgatatcgaaggtagtggaggaacgaaacggattcgatgtattcctgtacccctggcgatctgtcgttttggtcggtaaagtttccgcgccagggtatagcaaggaaggagtcgcaaaggccgaggaggcatttggaggaagacgatatcgtcagggcatcaaatcgacaggaaatccgcgacagagaaacgaagcacccacatgttcctggcaaaagcccagtaatccaacccagcctgttccagctcctgcccgaccgtcttcagcacatccccgatctccttgacctttccctcggcctcttgaagtatcctcttgcgctcagcctggttcttttccccttggtcatgctcgggatgaagcgaggagcgatggaggtggaagatgagcttcttcgagagcgaggtcgtctgcctagagagaatgatcaggcgttcacggcgttcgttctgggagcgagagaaaggcaggtagatgaaatggaggagagacgagatcggaccatcgtaaacagcgtcagcgagctcggacgttgtccaatatgtggtcaagcaaacaactcgccgactcatccaaggtggaccgatacgactcgaacgtccgcgtgatgctacttttcctatcttgtggttcgttcaaggtcgaattcatgacagacacagccatacggtgtgctagctttttcgtaggaaggtatgttcatgatggcaaagtgcattgatgttgtaaaggagaatgatgtccatgtgtttctcatcgatcgagtgaggggaatcatcaacggatatgacgaattgaagcagatgcaaatcgggtgagagcgggttgaatagcgtcagacgatcatcgtgtcttctcgacagtagtacttgtgccctcttgctaccgatttcggcagcttgcacgagcgtttgtggtacaaccttgtgggaagcctatgacacctgaacaacgtgacaccggcgacccgagctgacccgggtcaaaacgccgggacgtaacaaccgttcctccgcaggaaccgttcgaaatccaggccctggtcatcccccgtcccatcatccaccaccttccacatctccatggttgtcttgcgtgcgatctcagtctcgcttcgatacgatttgccgatccggtcaaacagcgtcgagacctgacgtcgagcgtccgcatcaaaggcgatctcggcagccgctcggacggcgaatagcagcctgtgaaacaacgtgagaatcagtgccgtgtcttctatgagcagacatggccaacttgcccgttgaagtagcccatgtccatggccgtgctgagcatctctatcatcttgatcagaacttgtgtcacccactcttgcgacggatgctcttgcagcatttgcgagatccacacgtccaagccagcagtgaaaacgcgattgccgatattggccctcttagcaacgggatccagcgactcgttctgacagcatgacggccgtcttgttagcgctagaagcttctctgtctcttgccatgtcggctacccacctcgcacctgttggcgttggcgatcgtcttgcagctcaacgcaaacagctcgtttcgccaagacaagtcctggttggtcacggcagccatgacctgcgcttgaccagcgtaatcccgagcactcgccttgagttgctcaatgcgtaaatgttcgtgccaaagatgaccagcctgtcgtccagcgcacgggggggggggggggttgtcagtggcattccatcataagggcactctgagtgacctacttgacatccgagcagcaacgtcgttctatccgagatctccaaagagatcagctcgtcgttgcctttcactacgagccacgattgacctacctatccatcccgtgaacaagctcgacgtggtcgacagtgcatccagcgacttcttccatgaaccactcggcgagatcgtggcagagtaaaggtcgacgcagaaccgaggcgaacgctgacaaacacgagactcgctgtgagtggacgacctccataggcgagtaaggtgggtactcacccaacagttccatgcatacgagctgttcaacgagaaaccttcgctggggcgtcacccttgccgccatgaagggacgaggtccgccgacagacatcaacacgccggcgctgacggcgagtccctctgcccaccgttcatcgcctgcgtacttctatctcgtgtgcgagatcatccacgttgttccagcgttagcaaacacgtatacaagtcccacctgatcggactcacgtcccgcagcgccaaagccaatccggctgcgacagccatatccgcctcaatcgtctccaatccgagttctcctacgctgaaagctaattcaagcaatttaaatgctcgtcgacgatgttcttcgcccgttccgagcgcgacgagcgacctgtgatctcgatcgctcgacgccagtgccaacaggctgcttcgaaaggcatcgtgcgctggtgaagagccgtgcggccgtactgtagccaagatggcaaagtccgtgatccagggattgctggcctggtccaccggcacgaccgtcattgtctggcatagcacgtcggtcaaatggtgaaactggaaagttcaaacgaggtccgtcgagtcaatctacaagacacatcccgctttcgtctgttcgcaggcactgactagcatcctgtccttctcttcaggataaaatggcttcaagatatctgcatgatctagcagtggtagtgaggcggccgaagggaaccagcctgatgttggcccgggtccgagcatattcatgtgcagcggcgtcaagctgctcgctgcgaagccgccttggagatgcgtggcatagaacgtattcggccagctgtatactggtaggcatactcctgaaacatctgtaaccgtaggtgatgctgtcgattctgccacctcgtagctatcggtcgacgcgctagagatggcaaggtcggaaggggagcacgaccgcaagggatgttgtagtgcccttatcgattcgacaagggctctggcgaagtcagattccgtcctagggacgtctcccaaggtggctctccccgggtatacgcactggaaagaaggtcaccgcaaagcattagaccgggcaaagacagggagacagcccttttcgcggactgacttgactcttccttgacaagcaagtccggcacgatggtttctcctctccacacttgactctacggctcttgcaggacagacacccgtccttgctcttgcgggaaaacttgcgttgacgtcgagcttgtgcctgcaaagtcgggctgactcggctaggtgttcccgttgtgtgtccagacgtgtcctcatcggcatcgccgtccacgagctcatcgacaggtgcgctttcaattgctcgtacggccggcattccaggaattcgatatagagtcgaggcgactcagctagataatgatactcgttcggtcggatggggaggcagtggcagtgcgttgcagggggcgatcgtgattttatttaaaggtcgatggtgaccgggctgtgctcaaggtaaggttttgtccggcgacaacctcggaaattagattccggacctttttggtccaagcgacatggatatgcatataaggagacgtctttgcggtcgcatcgtcttcttcagatcgaacgtcaaataatcacgagggtatataacggtactcggtcagggcgcctgcgccccttctatggctctatggtgtctaagcgacatgaagcgacatgatacacgattcacatgacacatgatcgagggcgggctcagcattgatcctgcaaattcacgagcattttcagccgacaagtacacgttcgcttaagaggcccctcactcacgatcaatcggttctttggccagccatacttcttgtcagggatctgatcatatgtcgatatgttgggattactttgcggatggacaagattcagctcgagggagacgggaacctcggcaaagattgcacccacgaaaaggcaacgatgttgtcctcgataaacttggtcgtcgggaaaccttccggatcacacccgacgttgatcttgtcggggtgctgatacacccggacgtaatcgacgagcatgtgaaccggccacatctcttcgagaccctcataatcgatggcaccgaagttgggactgatgccgaggttcaagatgaggtacatgggctcttcaggcatcagccgttggccaacctcggtctgggcatcagggccgattgcagaacctcgcatccaccaggactctttaccgtcgttgacccagcgcaggtagccgtcgctgcgggaaaacgcagaccgtcaataacatcctgccacgacgacgtcatctaactctagactcaccctccagtctcgtattcgacgccatatttggacatgcagccggtgcctcggggtccggtgctggataattaaattaggcttcgcgtttcacccggcctctacttccgtcgcgcctcgcatcactcactagcaatcaggatcagtatacgccaagcccgaagtcgattgctggtacgagttgccgttgaacgtgttgaactgcgtcacgtcatcgtcgataataccatagtcgaccccgctgacgttgctcatatagtagccggcgttgaacggggcaaactggcccgattgcgatacttgacctcggcggaatgtgtgatcgacctgattgcgacgaagcacaagtcaatgacaggtcgtccggttcaggtcgtctacatgatcggcctgagctcacctgcgcctcgatgacgtccagctcgggcgctgatctcgctttccacgtaccatccggtttcttcggaccagggtgcgagggatcgtcaggacacgtacacgcggagaaacgctgtcccatgaggtacgacagactgcccaagtacggctcgtattgcgatccagaggtcagcgcgatttcaggcttgcctgagcaaagatgcaagatggtatcagctcgagttcatggacagcgacccgactagagacacttgaactgaccatcgagtgtctgattcgccaaagtcccaaggtcgcacgtatcgtaggaatacggccacatgccatcggtagttccgccgtagcctggtcgagcgaggtttcccatcatccaaaaagcgggccaaaggctgcgagaacgtgacaaggggataagccgggctgtccgtgatggaacccttacacgcccgtctcacccgtaaacgtcactggtaccaggcaaagatatactggctgcaaattcaattgcaagcaggaaaatcagcaccccgggcgtggtcctcttcgtctcagccttgacactcgccctcgacataacccccagtgaagcaaaacttgttccacgaattgatgagtccaccggtgtagtcgagacctcgatttggagttcgactgagagtgattttgagtgccccgccctcggtcgtgacggctcggggatcatacctatgatactctctatcagattcggatcagaggcaccaagttgcgagatgatagtcactcaccactcgagattgttcgtcacccaataatgataattctcggcctcccagaatgggtcatcgcccgaccaaaatgtgcgcccttcccgctcaaactcgtcactgaatacgagctcccattgttcgcccgtctccaagctggtgtgaaagtaggcactctcgggcgtgtccgtgtcgatcaattcgaaccccctcgcaaacgttcctcgttgtcccgtagcgttgatgccacccaagttataagagccgctcgtattcccaccatcatcttggcggtttctgagatgttgagcgatgggccaaccggcaaaaacgccgatcagcgcaatggcgagtaggagaagacacccattattgatcaagcctcgcaaggtaaaaatggtccctccccgatctatcttgcgatcgcgtcgaggatcgggattgtgaagccagtcatcgggctccttgtccgagggcgatgttgaaacgccccagtcagacggactgtgcgaaagtccaaactgcgggtgtgtattcagtatgtcaacagggtgttaattcgggctctacgattgccctggcgcaccggttgaagtagacctcgggacggactcggacacgggcttgcagcgtgcgacacgagactagagccggttcgctgcagttcaagatactctccttcgccatcaggacgactggtagcttggagatggtctctgggccaggccataatgagcgatgcacgatgctataggacaagctatctccttgacgggttgggggaaagcggtcaactcagtcgcttaacatcgaacaacacgtcaatgaacaaatccagagcatgccgacccgcctggaaccctcagacatgcgcgattggagcttattgtccctgtcaatttgcacagcgattgccccttcttcctagaactttctttcgtttgggtctcgtatagcgctcgtattcctcgtatacctcgtatacttcatatccaacgtgatcgacgacgcgcttttgcgatccgataaaaatccgccgcggttcgggaagtttcttatttttgcttccgaagcgacgggcctggcaatggtcaaactcggcgagcgggcagtgatcgccacgagaatcttatcttgtttatcccgagcaagagcgcatcaacgtctttgtcaccaatgatttacatagacggagaagacgctgtgcgaattcacctctcggccatgaacatgcagagcaccgaatttgatgcgtgtacgcttgtccgacccccctgtgaccatgcgggccttgagcgttgcgctcgcgctcgctcgcatacgctcggtcgattcaaaatgatgactgacgatcaacccgtcgacttgactcgtcgtcttgtcgacgggtgcatatgtttctacatgagcgttgcctgctcatccctgacagagaagagctccgttgttaatcctagatcttcatggacgggcaaactcggacccgcggtcgtaatgaagccgtcgcagtgccatttgctccctcggatgtcgccgattgtcagttaccacttgctatttgcgtacgcagatgatcaagtcgacgagtcaaaggtggtgaaaccagagccaccgactggacggttcgctagtccttttcacatcggccaattgaatatctgcatgatgtagcacagccatgagagacaaatcaaacgtgtcaccatgattacgcacacccgcaagtctagcttaccaacgatgcccgagagtcagacgattaccttccggagcgacttgtagctccggtcgcgaccttccgctgcatgtgactgcaagtgtttctcaccgtcgggatgccgctgatacgagtatctaagccagagaggtccgaccaattgatcccaaccctacattcagctggtctcatcactcaaccacacgacttcattcgcgccattcgcgccattcgcccatacagctacctcaaacacccctcgctcacagacatggacgacgctttcacaaagtacggattcacgccgcttcccgctgatcagacaaagacagcaccgagcacgaccgagccagctgcactcgacatcaaggacctcgaacctccgcactctcctctcgccgatcgtatcgacaagtacgccaaaggaaagctctcgcctgacacctaccgacactcgctacgagtctactcgtacggtcgtgccatcgcgcaggaatgcttccctcagtggggactcacgagtggaagtgcactcgatgagacgtggttcttgaccgctctgttgcatgacattggtaccaccgatgacatcattcacaatactcggctcagttacgaattctacgccggctatcacgccctagacatcctccaagacgtacgcgtcactggcggtgaaggcatcgctcctcgcgaccaggcggagggtgtagcagaggccatcatccgtcatcaagatattcaggacaagggataccttacgctggtcacccggctcattcacctcggaacgctcctggataatatcggagccggcggccatctgattcaccccgatacgatcgaatcaatcgtgaaggctttgcctagacccaagtggagtggctgtttcgccgcaaccgtcgccaaagagaaagagtacaagccttacaccatggtcagccgcatcgacgggtttgaggagaaaatcacgagtaacggcaaagatgggttgatgtgcaagcatgattaggtcagggacggtccagcgtgtggttgagtgatggcaagcgatcgagtgaagtcttgggcgcttttgtaccctcactcgttagaagaagaacagatatgacggaggtaatatgaatgcatgtaccaacagtcgcgagcgagcagtgtcgttccacctagccacctagggacatctggatgctcgatgattcaccctcaggatccaggaagccgggccatgagcacccacggcacaggcttcatttgacttcaatcgacgctctactcgagtgaccgcgtggccctcgactacgatgcagtcggcccgagtcgtcgtggaccgcgatggaatagtcgaaaactgccatatcgtccacgccgctatagtcgacgggaatggcaaccttctctacgctctgggtgattcggctcgtgtcacccttctgcgatcttgtgccaagcctctgcaagccctcgcgatactcgagaccggatgcggcgatcaattccacgatgccgacgtcgcactgatgtgtgcgtcccacagcagcgagcccgaccacatcgcaagagctcgtgtgatgcttgaacgggcgggtgctcaggaatcaaacctgcgatgtgacggacatgcctcattagatcctcgtgtggaacgatcttgggcaaggatgatacaccagcctaccccgatcaacaacaactgctccggcaagcacgcaggcatgatcgctggtagcaaggagcttggattatcatcagcagattatcacaaaccgggtcacccaatggaggtgcacgtgagacgcgtgatcgaagaggtgttgacgaccggcatctcacacaacggccaggtgcgttgggctactgatggctgcaacctgcccgctccggctgctcgtctcgacacgatggctgccacgtacgccggctttgctcgaagcagggatagagtctcgtgcgggatgtccgacttggatgtcaggactcggtacaagagcaggattttcgagtctttgacgcggtatcccgaaatggtcggaggaagcgatcgattctgcacggtgctcatgcgagcgtacgaagggcgtcttatcggcaagctcggcgcagatgggtgctacggtatcgccgtccgggcggatcgaatgattactacagggcatccaaacagagaggtcatgggcatcgccgtgaaaatcgaagatggcaacgtggacatactctacgttgccgtactggaaatcttgcgtcagttgggcatcaagccaaacgaatcggtcgatgaggtggatgctgaaacccttcgacgtttcacactggccgatcgtcgcaataccgtaggacaagtggtcggtcacactcgctgcgaattcgatctcgtatgagcaaagccgtgtattactggcgatgtaatcacctcgtggccagagaacagggcatatcgagggcctgattttgacgctcgacattcaagttcattctagtcattataggtcggtggtgattctcattcgtggtcgctccggaatttgtccaagggctgaatcacaaatggtcacgtcgagagaatgtatggaaagatccaactatctcgaggcaaggtttccaagtaaaaccgaggcgtcggacggcatggctgcgatagttctctccagaatcaaggcctgagcggggactttctatccggatcttgagcatcatcccgtcgatgacaagtcagcattgcctcggctcgttggtcgtcgaggctgttgtcgatcccaatggaagaagagtttgactcttcacgagcgattatgatccacagcgggatagagattgtaatctgcaacaaggtcgatgttagaggtaagcaagactcgcggtgagcgacgaacggaattgaattacaagtgcgaaaagcgaccatccgctcagcatgagccctgttgcgagtctacttcccacaagattaggcccgtgcgtcgttgcggactgatgaagggaggtatgttacgatatgccagactgacctacaaaagagcccttccttgcatcctttcctaccgacatccctggacgatatgacgttgctgactgtgcgagatttgcgccggcatgagcagatgtctcgaaatttgcgtcgcattggtgatgaatcctttactgacctagcaatacgatccatagaggacaatacgacaaggcagccagatcagcatggaagacccgcttgtctcctgtaaccctccgcttgattttattgatggcgaaactgtagcggccaggaacgaaacggtcagacgagggcttggatcaagaaccttctgctagacttgcaaataaaacgctgcgatggacgacacggacccggttatgccgttggccaggtatgctgcatggttacggcgcagcatgccggtaaggatgaccaaaacttgaccaggtgaaaacaagtccgacgagatcgggcgaatcgcactcacgtccggtggacattctttcatctgattcgacgatccacgcacgaaaaccacagagagccaccagaactgatagcaccgagagtacccacagcacaatcaggttggggtagtagcaaaatctggcggtgtcttggcgaacgcgttgtagccatggcccagatgtcgagcctgctccggtccgaccaaacagatcagacaggatcctccaggttacagctaatcgtgtcggattcatggtctcgtgttggagcacgaaccaggtctgtccttcagggaactgacgggacgtccccctggtctatataacatgttcgggtatggcacaagtcaaatgttatcggctggtggctcacctcggcgtcttggcgtgagggggatgccgaagtcagctcgggcaacgtaacgtcatgtaccgttcgaaattcggcagttcggtcaatcatgtatcgcacgtatcgagccgatatactctgtctgttacaccaatatatgtttacactccgattatcactgtcattcttcacctatcagcagcaagcaggcggactctcaggagtgagataagggtttcccgatagaagcccccggcggtgctgtcgcttcgtccctgtagtaaggcggacccggctgtcctaggtgttccgagtcgaagccttcctcgagagtgatgttcacagaattagacgcacgaacgaccccaatccagagtgacatgagaagcgacatctgtggacgggcacgtacccaagcttagtgctctttacattggagagcccgtcggattgctttcaactgaccagtgcgaataatagccacccggatcccatagtgaatttggcgagcctatttcatcaatcatggcgatgtagaagcgtccgagactggctccgaagtaccgaacgcgatgaaacccacctgcagaatggaccgccatagcaaccgtacttgttgatatcgctcgtgagaatggcgtcactgactgtcgaaaaaagagtacccggcgaggatttaatctcgctggcctcgacgcaccatgaatgagcaaccactaacccaagagcgacaaccataacgggctaaagagcgtgagcccccaccctgctttcacaaccttgttttgcccactcgcgttcctcgtcctgatgttgaccatcaacctgaaacacccaattcaatgagacagaccgttaaccgaataggaaccaacgcatgagacgactctcgagctcacatgtataccgccgaagtccaggacaagccggctgccaaccccaacatttgacaagctggcacggtcgcgaaccgggaagacagcctcccaatccgatcaactcgagtgacggtctcggacaatttcgagcctgctcacgggtcgacgagaccacatctcctttgccttgcgccacagccttgataccgaacaggaacacgagaactgagaagaattgcacgagaaagagtcccacgatggtcaggttgaatggcagatccgcatacatctctaaagcagcgattgaattggggatgggtcggctttgcagatgcagcctccggatcgtgagctaggatagtcatccgagtgacattgagtaaaggtcgtggcaaccctaagtatcactctgctatttcacacgccgtcgagtgggcgacttgcgcagctgagaacgcgacctgggtatcttggcgaagcgccggagtgaacctggctcggctcagtccggcgacccgtcgagttgacttgcgagcgttcgctcgacatgtcggcatcgatcactgcgtcagctgcacggcttgcgtcggagctggacttggagccgattatatcgttttatatgaacgctagatgggcgacgacaactacagggtctagacacggcgatattccgatcgacgtcgcagcaccccgctcgatccaactcgcccggacatgtccgacatcccttacccggtcgcctttgccacggctcggcaacaacgagcccatgcccagatctgtcaagaacgagtggacgctggcaaggtagaccggactgacctcgccttggctagcgacttgatccgcaagccattcaagttcgcccttgtgggtcgatcgacgtagacccgatcatttcaaagcggctactcgcgcgtgctgatatcgtttcggggcctatcacaacctaggccggctgtgttctggggctagtctccaccatcccgctactcaagctatgcaagccgtgcaaccgctcgagactgtttcgaacggcgttgcggatgagcgctgcagctgccggtacatacggcggtctctatgtcggtctggtccggacgatggcctttcgtggacgcggcctcgagctacgcgagatagacaggtacgcaaaattgattggaagctagatcagatcgtcgtctcgtatagtcgcgtgtcggctgactgaagaaaccccgaccatagattgatggatctgtccgaggagctcgaatctgaggctagagcccgtgtacgacgagatcaagccgatgagacgagacgagctaggcgagaagcacgacgtgaggttggaggtgaggtatgcgcgggggcgttgtaaattctccgggatacgatatcgatagggtagcgcgtctgtcagattccagacgatcattccgactttgacctttgagggaagggtttggtgggtcagggtataacggaccttgccctgtgaaacagattcacttgcgaatccgatcaattcatcgtcgcagtcgactcttgggccttgcttacgaaccaagtcgctgggaatgggtagctgtgccaacgcccttgacgtcatgtggttcccgtcaaaatccccggtgattcccaatttctcgatctccccgatctcgcggacgcggggaatcgtctcttttgccaaggcgataccatacccgtacgtgtgccaaccaaccagctacgaaccattcaaaggtcagtcagacatcggattagacacggattcgtccccctaatctcgtactctgtatctcttagctctatctataatcgtctgcgatcgcgacactcgatcaggtcaaacccgcgatgaaatcgccatcaacaatgctcaactcgctagtcaccaacctgtacacctcctggtggatgtcacccacaatcttgcccttcgtcgcactcgcagcgctggcgtcttaccccctgggtaaactcttctgggccctctttgtctcgcaccacatttatacccatacccaccctcttcgtcgattgcctcggataaagaaccgcgagtcgctcctgctcggtgccaaccaagccatcctcgacagcccacccggtcaagccgaacgggcctggttggacgagcacgactcgaccgtcatcgtctaccctggtttcctcggaacacactcggtctacatcgccgacccgacggctattcatcacctgttcggacccggtcatggtgcgtacgaaaaatccgagattaggcaacggatcctacgagtcctcctcggtcaaggtctcgtcaccgcgacgagcaagcaggccgtcaagcagcgacgcatcatcgtccccgctttgcagaccaagaatctcgaacgcctcgcacccgtcttccaggacgcgtccgagtcgatggttcaggtcgtcaaggagaatctcatgcaggctgaagccgaggggcgcgggcgcaaggccaaggtcgacggtggcaagggcgacatgaccgtgctcgacctgggtgacgtactgtgggcgtgctcgctcgacattatcggccgggccggcttcggctacgatttccacgccgtctccagtgctcgtcgacatgttcaacctgccgtcacgaccagcagctcgatcgacgaaaagatcaccaccacgatcacttcttcttcgacgcctcccgcgcaaaaccggctcgctcgtgcctttgacgacgccatggaagcgaccttgaaaccgtcgactttcgaccgcctcgtcaccctcgtcgccgccgtcctgtttcccatctttaccatgctcccgatcaccaaggccaaccgagaatgtgtcaaggcgcgaaagctcatggacagggtcgccggagggatcctcgaccaacgactcgccgccgtcgaggaagctgggctgcgggaaaaggccgatttcgagggggatcaaaaggacctcttgggcgtcctcgtccgcgcgaatctcgccaccgatctcaagcccgaccagcgactcacccggcccgagcttttgggacaattgaccacctttctcgtcgctgggcacgagaccaccgcggctgcagccgcttggttgttgtactacctctcgctttaccccgacatccaggccagggtctatgccgaagtcaaagagctcgatggcaaagtcgcgcaggagggcagggaccgaccgacgtggagggagatggccgagttgcctcttctcagggcttgctttttcgaagcctccaggttgcagccctccttgcctgtcacccaccgagacgccgtcgccgacgatgtcatccccttgtcccgacgtgggtgtctgatcgacgattcccgcttggatacgatccacccgctgaccgactttgattgcacgctctgcagctcttcgtgccagcgacaacggcgaaccgatagagtcgatgtatgttcccaagggtaccgtcttgaccatcggtaaatacgataagagtgcgccgggtctcgttcgtctggctgacctttgcttttgctatcccgcctattaggaatcgccgccatcaaccgatccaccgacatctggggtgctgatgccaacgaattcaagtaggtcttgcctccaagctcgatgcctcccttcgaacccggtgctgacgtattcacaatgctcgtagccctgatcgttggttcgacctcgagggagacaagcatgctccgcctctcaagacttggtcgttcatgatgggtccccgaacctgtcccggatggcgttacgctcaagtccaggtcatgtggtgagtagcatcgcatctggatggctcttccgggttcgactgaggctgactttgtatgtaaactccgcagtatcatctcttccatgctgcgagagtttgaattgcattacgccggtctcgaacttcaggctcagatggtcagtcgagtgatgacgccgcctcgtatctcgttcgcttactaacactcgactaccttctgcattgcgtatcgcaggccaagatcattgccggtcgacccatcgtcaaggatcaagcggacgtcggctctcagctccccatcggtctcactttccgttcggcgaagaccaacaatggacaccccacaaagtagaagacgctcgctcgctttcctcatagatgagcttttttctgatatgaaccaggtcttgactagacgatagaggtgcttgcgaagacaggacgtgtacacgatcgacgagggattctcgtttttgtcggaaatatgatgtgtttgaaagacatttgaccgatttgccgagccgtcattattaattgtgtgaaagctgtgagaatgggagcgatagcgatggtgtatatcgggtctacgttttgctggatcgtcatgcaaagctgagcaaacgtcggatctgcgatcgtgagaagcaaatatgtttgccaacggttggtacacgatcatcacgggagagcccgccttgggtgagatcgacaagattgcatatctcatctatccatcgctgccggtcgaaactcttgagagtcaaacggcacaaccatcaaatactcgcctttcaacggctgaacgcatagacctgcaaggccggccagatctagcatcacgaccgacctgatcactcgccccacttgcataccaagccaatctcatcgacgacctcgaatcgatctcagccaaacacccaccgaacatggcgcccccacccgccttgtcatacgacacgcatatctacctcaccttgacactcaaaccggatacccctctcttccacgatcctcgctctttacaatcccgctcgctgcccgtcggcgtcacgcacgtcgctcaaatcggtgaattgcaagactcgcacatctaccaaatcgatggcccgaaatcggaattcgagcgtgtcaaggcgcaggtgttggccagcctgcgtgaacagcagggggtggtcaaggtggaagtcatgccagagccaaagatgagggtcaagcggagtgcggaggatctgtagacggtcggcgacggagggatcaaatgaaagaaggtcagagattggctcgctttttgttccgaatcccaagtccatgcatatgagcaacgagatgcatgtgtatctggattttgatctgttcaacttcctgtcttcatcacgtccatcatagatcgcatcctccttctcgactgtcactgaatcgctcgattataggtagaagtagcagttctatccaatccctaacccctcatatccttacttcccccttatcttgtcttcggatcaacccgaagattcgcgccgagtcagattttcgactcttgaacttcgaacagcaaccaacttcgaattcgacaggacatcctgtcgacaccactccacattcactcgcttggccacgccatttcgaggctcagtcctgttgccttcttaggaactcaaacaatacccattggcgacgcaccgcaacttcgaaatcacccaactcatcatgcctccatcatggctcttatctccaaccgctctcttctcccggacttcatctacgtcctcggtccccactctcctgtctcccagcctggaaatcaaatctcctttccactcggacgctctgctcactccgttcgaacaggagtacggcaagccagatctccctggtggatggctcgacgaggcagtcttgcgtcaaaagctggtcgacgctgtcaaggatgggcacgcaaagctgtcctctgaggtatcagaggagagtgacgacgtcgaaggttcgtgggaaagggatatcagggtgaccaagctcatgatccacccgatcaaggtgagccgctgtttttccagcgcgacgggttctggaacgacgagctgatccgatagtctttcgagacagagctgccgtgggattgctctccaaacaagcgttctcactcctcaaggcctcgaggtatgtcttccggtgctctcgaaactgcgtttcgtacgagctgacgctcgagataccacatgaactcgcaaagtttgaccgtcaatgggccatcaggaacagctcgagcggacaactcgttacagctcgagaacaaccgaaggtaagtcggtgcatcgctatcgctccgactcttatcgaatcacgagcttataaacgcttcacagctcgtcctgatctcatgccacatcgaccaagccgccaacgagctccgagtcgcctttcccaaggatgccgaactggacggattttcggtcgcccttcgagccgggcttgaggagatgagctcgtgggaaaagtaagctctgtgaaacattgacgatggatcttctcacgccgctcgctcatgcgtgtcatccctcatcaggattacttcgagcatcatgcacggacataccctgcctcctgcgcttctcgtccctgcgctgcactccccctcgacatccccctctgcccagatctcccgattcctcgggatcgatgtccagcttgttcgtgtctcgcctatcaaggaggacgtccgtcggtgcgacgccccgcctggcgagggcgaaaagacggaatgggaggaagagagtttgagattgggcgcttcgggcgaggtcacgaccgggttcgcggatggttacccgttgctgatcgccaacgaaggcgagtcgttgttgttcagtcaggtccgggcttgactgacaatgacgcctcgctcaaacagaatcgtaccgagccgttgctacctccattgcagactcggcagcggacgcatatccaaccggcctgaccgacctgggaccaacgtttgacaaagctcgctggcaaacccgattgtttgattatcgtcgatttcgcgccaacgtcattgttggtagcaattgcgatttgccgctggaactacaggacgtctcactcgacgaagcgcatgcggaacagcctttgacgggtccaactcgaccggcctcggcttgggaagaggattcttggcgggagctcgagtttacgagtaacgacggcagcggtactcgaaagggcagcttgatctgtacaagtcgttgcgggaggtgtcagctacccaacgtctgccccgagacggccgagcaggacaaggcggtcccgttcaaggtcatatccaagtatcgacgggtcgatccggccgtgagtcagagtgacaacctcttcatctgacgtttaggatcgcacttctgacgacgagcatcacattgcagcaaaagtacacgcccatctttggggtcaacgccatgtcgaccgacatgtctggcaagctggagatttctgtcggggaccgtgttagggtggtcacccgaaaccaatggcgatcactgccggtctcgaacggaaacaagggtaggacttcgaccgtagcctagggtcaagtttgcccgggtcgtctctggttctgttctcctgcacaccacattcgttgtaacccggtcactagcatttctgtccaaccatcccaccatcctacattcattcattattattgaatccaaggcggctaaacccattacggcaagtctgcgggatcaaatttgatcccgtaatatggtcggcggctaacaattgactgaggtcgtgggtggcaagtcgcgctcctcggggtttatccatttccaagctgcttggtgtgtggaaccaatatccaatagttctcagtcgagatcttatcgagtcaaagacttcgtcatatctcgttcaaagtttgcactttgacgtggtcggcctatacgttgatgacatgacagtcagcttcatactcttcaggctggacataggaataaaactcgagtcgaccaacgcaccacgatgaatgacgctggtgacgacaagaaactcaaaccgctccgcgagggaacggaatacggcgatgacagtgtcaacccgtctgtggtggatcttccttatgcctacgagcagaacggcaacaagagcaccaggagcacggctttgagtgatgcctatcgctctaccagtatcgagatgtcatcttttaggaggccatcagcagcagctgcagcagatcgagaccgtttccgccggtactcgcaacttagctcgggtcgtcccgaagtcgaatctcagcaattgccaccggttcgagattctcgaatcgaggaagagccgagcggggcagatcagatcgatcggggtaccatagatggcggtttcggttgggttatcgtcgcctgtaagcaggtgcgctgatcgagctcatgttggagtccgagctgactctacagtatcgcaggtacatttaccatcgcctttcactttctcggcttcttgtttagctggggtgtcattcaatcggcattgcttgagcaagggctagcaagcacaaggctgcttagtatcattggcggtgtcgcgacgttcatgaacgctgccggatgtttccctgtgagcggtagacccaatcgacctttagtatacgccccgcctgacgatcttacttttctaatgacggctaggctgaacgactggtcagacgcttcggacggcgtaccatcggcctgacaggtgtctcgatgcacgcattcgcctgtatcgtctcgagcttttgtccgcggagttacccgggtctgctcatcctccagggtctgatccagggtttcgcttgtgccatgcaattcatggtcagtttagagttgtacaatcgcgaggataacaagatgtgtgctgatctctgcttggttacagacggtgtatcctctacctgcaacgtggttcctaaagaaacgcggcatcgctatcggtataacatgtgcgagcagactatcctgacgacagacgggctggggctgatcagccctcatgtcaattgcagcctgtggtggaggcctcggtggtgccgcttggtcggtcgtgagttgcctttgacaccgacgatctacagccattttgactgacaactaaaaacgcccagatcgtcgaaaagcttattgagaaatacggattaccttgggcgttccgagtcatgggtaaggtacgcctaactaagtttgtcgtgtactgtttcgctgactgcggacctctccaggtatcagcctgctggcggctggtttagtgagttggggatcgatcaggccacctcgagactagacctgaaccgcatctcccgcagcccgccgcctggattctacgggatggaccgattcgctaccaacgacaacctcaacaagtcgccaatgaacccagcttaatgcgctcgagaccgttccagtggttcatgggcgcgtgcctcgtagtgtcctacccgttcttcattccagcctttgtaagtgctcactttcttttttaaacaccaatgccactaaagcgtttatgtccatcacagttcatcccccaatacagtcagtataaaagagtattatttcgtgattcagacactgagatactctgccaccacagccgtctcggtcggctatgggtcaggaaccggagcgctatttggggcgatttacaacttggcttcgggagctggccgggtcggttttggagtgcttgcggatctggtcgtcggggtgagcatcacgtcgacaggaacgcatcatcgtggttcactgtcctgatctggctgtctcaagaatttgacggcgtggatcatcgctctttctggaatcgctttgagcacgttagcggtatggccgtttgccaccgccaaaggagccattgttgtgtaggtttggtgaccttcaaatcgttcctcggctgcatcctgacaaacgctctcgcctcagcttcaccatcattgtaggcatgggctctggaggcttcttttcgctacaaggatcgatcgtcgcccaactcgtcgggtctcaccgcatcgacaaggcgatcagcatcatcgaactggtcgagagcgtcggattctttgccggaccagtgaccgccgggttgctattggacgcctttggtggccccgaagctggtcctgcagcctatcgtcctgcgatggtaagtcgatacgcaagtcgatcaacgtattgcactgatagacgagccatgtggcctcgcagtggctcgttggtggtacgtccgctctggctgtggccatggcaatcaggattcgattcttgtacgaccccaagctgttcgtcaaggcatagcctgcgtccacacatgtatgcaaatatgccgagactttctatacgggaggcatttacatgaaagtatcgttccttctgtaggggcccactccttatgcttgagatttcatgtctgtgatatgttggttgatgaattcctgctgatgcaggacgtccgaggggatgtgcttggctccgccgatcttgccgaggcatttctaaagggacggagaagcgcatgaatatgttggcacttttagatgcgacatcgagttctcactgacctcggtcccacataggcaatcgaatgggacgcccatgtcccactcggtgctcgggtaaaagaaagtcaaggtctctcccttcttgatcccgctaccgagcgtcttgagcttccaggaggatgggaaatcggcaggttgacgagggttcgatcgctcgggtcgttcgttcagatcgaagaacacgttgggctcgcacgaatggttgactgtgaatgacagcaagatctggttagccagacctgtcgatcggggtcgaccgcacgatctgatgaacttgctaaacaaaaggtccgagttcaactcgaaatgctcgtcaggtccggacccgtactgaacgctcgagtaggctttcggtcccgaggtcaggtttcgcaaatgacagacggtggaattgggtgcaatatcctgattcgagtcgggcagcgtttagctgccacaccacgatcgtgcggatggccaatcgctcatggacccacctgctcagctaccaaataactcgaataagtatcctcgccatcgtctccctgtcccttttcaaggacgaccttgagcaagcctgggtgtgtcggtttatagctcgaagccaattcgggtgtaggcttcttgtatggggtaaacgcctcggtgcccgcacgcggcgaggtggtctcagattgaagagcgacagtcatggcaaacaaggcaatgatgattcagtctagattgagtaacacagagagagtcgtggatcgaccaagtttcataagaggaccgtagtactgtgcttttggggatacaagtgacattccgttcaaagacacggtcctctaccaaacgatgacgaccgtcgcttcgcccagtgaccagctcggccgcaaaagtccggcaatcaccggactcggattacccggcggcatctaccagatcaacattccaccgtcgacaaagacctcggaaccggtcatgtagctagagtgttccgaaagcaacaacaggacaggaggagcttgctccttgggttgagagtacttaaaaggtcgccgtcgaggtgtgtcagatcgcgcacgtcggcgagtgtgccgcgagactcacccttcgtaggggaacgctgtcttcgtgaaacttgcggacggcgggagcgtgaacacctgactgctcagtctcgacgtatccgggagacacgatgttgacccggattccgtggctgcggcagggatgccgaggggggacgtcggaatcagtggtctatatcgacgctgttggttggacggggtctttcactcacggagcccattcggcggccaggtttttagccagactggagacggccgccttggacgagttgtaaaagacctgcatctcgcaactcattagccatgccacctcgccgaataagccggacgctcgcttacgtgtcgcaaaggttcgttcaaagccgattggttgtagatctgcgagctcatggacgagatgaccacgatcgagcctggcaagggaatcggtggaaggcggcaaggtgaaccacatgctcgttgcggatctctacatcgactcgctactcacccgtgtcgaacttggtctttacccaatgcttggcggcggcctgagcagtgtagaagactccgaggacgttggtcttgactgtggggtcgatcgcgatgtaccgtgtgagctggtacaaatggcgcagtacgatgcacccccgaacaacctacacatgactatacaaaggcgttgcgggagcgataccatggggatcagtttcggggtagtgatgacgtccggcgtttcgacacctgctcacaatcaaactcttcaccgccgacttcgagtgcgtccttgacgatagcgactccggcattctacccgggaatcgaacgagattgatagggtcgacaaatgagccttgagccaggtctagcacgttcccccgccctttcactcacggcgacgaccccattcagaacacctttgaacagctgcaacacctcttcgaacgcctcgccgactctcttctggtcggtgacatcgcactggacggccttgaacgtctgtcccttgaactcttgctcgagggattcggcgaccttgacggcgtcgttggaggatcggtagagcatggcgacgttgcctccagcctctgcgatggaccgggtgagggcgagcccgataccacggttaccgccggtgacgacaaagttctgattcagggcggtggatcatagatgaggttcgagtcagccaggtgtcttgtgcatgagaactgatggcataggcggacgacggaatggaccgctcgaaccaacgccgacgactcgccttgttcttgaagtcgatagtgaagaccatgttgttcgtttcgtttgttctggtctttgagttacaatgtcgttcaattgatgtctactagctcttgctgattaccgacgacgatgatttggaagtcttgaaacgaagaacgatgatgatggtgatgatgaaaaatagctagctatatgatggtctgtcgctgctgacgctcccccgccggcgatggatgaccgccctttgtttggattgtgcggggtgaccgtgacctcgctcagggctggatcctccttcccccttcgatccccaatgacgatgcatcggttgacaacacataccctccaggccacaggctacaaagggatggtcgagcagcacgacacgatgatatcactttatttgtatgggaatcgatcgaaaggatgtttcaaacagggttttcggaggacccgaacgtcatcgcgtatcttcccggatcataccgacatcccgcacaagtggaggatcatcgttgacgttacatcatcccgttcttcgctcccgactaaccaaaatggtgtacgaaggatgttatggtagtatggtgaactgcgttctgactgtgacatcacaaatagccgccgattaatcgagatcgcagcgaccttgccccacgcctactcttgattcttgtttccatcgtcgaaattataactagtacatggatcatccccgctcgctacgacctcgacctcgagagatatctcaagggatgttgggatccttggcgtcgtgtttcgaagtacccaggggcatatccttcttatcctgcgagtactccttgttggcgggagacctctgcgtaaagtcctttccggtctgtttacccgaggcgagcagtggatcagtatcggcttgaatgtcggctcgtcgcctcaacaggagacatcacccagagtcgcgactgacctcctgttctactcccttggcggcctcttcgggccccttgctcgtatcgtaagctgcatccgtcttggcgacatcatcgatccccgctcccgtactcccgctctcatccgagtagagttccatctttcccttgtcactggccatgacccgcggggtggtggtgaacgatcttgccgatgatgagatggggaatcggttggtctgggaggaaaggcgagtggggagggcgggtcggttgatagtggagaacgaggcgagttcgagtgtcatgggcgagcccgaaggttggcggaccagcggggtacgacagagcgtcttgagggtgcgaacgaatgaagtcattatgagttgagggtgtatgtgtgtgtgtgtgtgagatgtgattgggtcttgccttggtggtgacggacgctgccttgacaatcgatcaagtcgtcgtggtcaaagtttcaaacaggcaagacgagactggttaggtcgttcgatcgacttcgtatacaaggctgagactgttcgatgacccaggtggcggtcaatgacgtcactccggaaggacgagttcgtcatcctccaacccacggacatgagaccggtaaagagtaatcctgatgtccgtgcttgcgtccttgacttcgttccttctcggccgctgatattcccggccgaaccgaatccccggtcaaggacgtgcgggcgttcgctcttgatcttgtcatttgcttccgtcgcttcgcccccgcttttacaactcggttagccggttatcacgggtctaagctgctcatcacggggtttcacatcgacctatctcgagcgagagcgcagagatgttcaggcaattcagcaaccgacctttcagatcccgttgagctaagggaaagcggaagatgactcgttaggttttattcgggaggagatggtggtgaacccggttaccgagatgacatccgggaggtgtgatggatatatataaaccgacctcgtctcgactctcgatgattccagctcgtatcgattcagtcctgtcaacatccactcaccgaaacaattcgactcaaatttgaccacccatcgtcatgtccgaacaagaactcgaatcctaccaagcagaggtgcaggccgtgaaggattggtggaaggttcgtcctctctccctctatccctacctctcactcacgaccagtcagcatgtactgacctcgatccctcactcccgttgctacccggtagcacccccggttctcccgcgtcaagcgcaactacacccccgaagaggtcgtcaacaaacgggggaccttgccgatcgcctacccttccaacagcatggccaagaagatgtggtccttgctcgagagtaaatccagaggagagggcggtggttgcagtatgacctacggagcgtgagttcaccgtcgagatcgatcaagagtcctttacttgtgacgaaacgggctgaccacccttccaactggactcgacctggtcaggctcgacccggttcagttgacccagatggccaagtacttggagacggtctacgtttcggggtggcaatcaagttcgacggcttcgtcctctctcgaacccggtcctgatctcgcaggcgagtcgcctcgacccgtgccgtctacctcgacctggctagctgataccgactttgacccctctctctgcgattcgctcaatcaccagattacccttcgaacactgtccccctcaaagtcgcacagctgttcaccgcccagcttttccacgatcgtaaacaacgtttcacccgactctcgactcccaaggagcagaggtcctctttgggaaaacccgtggattacctgcgtcccattgtcgccgatgctgataccgtgagtgtcgagttcgagcgttctcgggattacgaatcgtacagcgagagagagagagggctgacggtgatggtgactgcgggcgaatgacgcgatatagggacacggtgggttgacggcggtcatgaaactcgccaagatgatggtcgaagccggagccgctggtattcatatcgaagatcaggctcgtgagtcgctgccggtccccacgctctgtgtacctcggggcggtctcactgacctatcttgcatctcgaatcggtagccgggacgaaaaagtgcggacacatggccggcaaggtcttggtccccatctcggaacacatcaacagactcgtcgcgatccggctccaatacgatatcatgggggtcgacaacctcgtcatcgcacgtacggattccgaagcggccacgctgatcacttcaaacgtcgacgagcgggatcacgcgttcatcctcgggacgccaaacccggacctcaaaccgctcgtctcgatcatgcatgccgctgaatctaaaggtcactctggtcagcagctacaagccctcgaggatgagtggcttaaacaagctcggctcgagctctaccccgagacgctcgcgcgtgcgctcaaggagcaaggtgtctccgaaagggatatcaagacgttctccgacaaggtctcagggacggctcacgctagtcgagaggaatccctcagagtcgccaaggaagagtttggcctgaagcgggagccttactggaactgggatgcccctaggaccagggagggcttttaccgataccaaggagggacccgatgcgccatcaaccgagccgtcgagtttgcaccctttgcaggtgagtcccggcaaacgtgccggatcccggccattccatggtaaacgctgacagtcccgtgtctcaccccttgcagacctgctgtggatggaaaccaaatcacccatctacgcacaagccaaagagtttgccgacggtgtacatgccaaacgaccgggtcactggttggcctacaacctctcaccatcgttcaattggcgcggcgccggactgaacgaccaggacatgaaggagtacgtttggaagttgggagcgctcggattcatgtgagttcagttggaaaaagcggtcgtgtttcgcatgggtacccaatgctgacccgccacccactcgtctagctggcaattcatcaccctcgccggtctgcataccaacgctctgatctcgaaccggttcgctaaagcgttctccacggatgggatgaaggcgtacaccaacatgatccaggagcaagagattgccgacggatgcgaggtcgtcaagcatcaagcatggtccggcgccgaatacgccgacgctatgctcatgaccgctaccggcgggatcagcagtacgagcgcgatgggaggtggcggatcgaccgagacacagttcagtgggatcaacctcagcaagttgtgaggcggttcgaatttcgagcatggaaatcgttgtataatgtcggtgaactagagtcgtcaaatggtcgtggcacaagatgcatatatgattgtcgtttcttcgagatatcggtctggcggaccgagtgcgtgtccatagaaaggcaggtggagagcatcagttgtcgatggatagacctttcctgttgtggagaatagatcacagcgggagtgtcaatgattatgcggttggagaagcgtgacgctgcctttggaactcgcctttggaacactcgtttcagttcttctgccaagtccgcgttctgcatcttgccaacttccaagtccaacctgatgaagctttccatcaattctcccgcctggtaaaccaacacgcttggcaatacgtccgggtcggattgagcgtcctgatccggttcttcaggtaaaagtgaaaaggaaagggaggtggctctggctttgaggaacgacgtggtggacggcgacgatgatgtggaaaggtctacaaacgcttgtagaaacggtttgcaacgtgcgaggttctgcggcaaatgaagctcagcgaagactcttggtagctggacacctacactcaccggctcgtagagcagcaccacagtccaacctgacccctcgaccgcctttaggaaaccctccggcccaacctctcgaagtcgatgtctctccaacttccaatcgtcgttcaactctcctatatcatgtccggcttgttgcttcatttcgtgtagccgtcgctccctccattgccgcttgaacgctccatcgtcgtcatcgacatcatctccgccactctggcgagctgcatcaatctcgtcgtctgttctctcgacctactcggctctccggtcgcggtcttcctcgtcgtgtgtctgagcctgaaaactcttggtctcgagctgtcgatttcgctcggtgagtgacatcctctcgagatcccgttccgcctcggattgccttttcgcatcagctcggatacccttgactccgttctgcgggccggcttgggccgaggcgaatgtagtatccattccggcctgggtgttaaaatcgaactctagacgccaggaatcaacacctgaatatgacgttccgaaggatataccgatatgtcgttgtgtcaagatcgatgacggtttgtctgaagcaagtatgttttgctgatgacgtttcggacgagaccgagggcagggaccaggagcttgggctagcaaagtgggcatttgtgctacatggcccactctgttcagcacgacaatcaaattcttctttggcaagtctagaaatgtggtagagagagctccgactcggtattctgaagcagatacagcaagttcatcatactaagccgatcccagaatgcctcctctctccagtaggtcatcaagattcgagtggtctcgaccgacattcacatcattcatcgtcttcacctatagtgtactgcctttggctactgccatcgtcttcagacttcgaacatctctccgttcaaatcaaaaccctcgccggtggagccccccgggagaatccttcaccggaatttgatccgcacgtcacctttctttccggattgtccctggatacggacgtagaggtactcaaacatgccgtacaacaaggactccgactctggtctcgtaacaaggcctcggacaacaaggcctcggataactcgcagagccgtccactcgagctctctctggaagaaccgatcaatggagggtcgttctacacggccatgatctatccggtggaacaatcgtcctctggctccgccggcgacgagaccgctttcgaccgcctgatatcgggtcgctccatcctggaatccctcctcgcctccttctatccgcctcgatcccctggcttctcgcccaaaccatacttcccacatctctccctgcaatactcttcgatggaccagtcggacctcgacccgctcaagcgagagtttgtcgagattgaaaaggctcagggaaggttaccttcgaaggtgacgatcgatcggtgcgcgcttatgcgcctagaaggagaggttccgcagtggaagacggtcaaggtattcagactggacgggcaggaggcataatgtccatcgtgaacaccaagcgggattgtatgcccgcacctgaccagctactgtgaggtcccaaggggatacaggcgagataacaagaatccgagcggattctaagacaaccttgccagcgagccgcgcccaacttgggtagatcattcatgacattctgccaatcttctggctaccgctttcattgcctggccgcggacctcgggcctatacagtgccgcctgcccagttggatcggctggaaaccttaattgacgagtgagactagtcgagcatacgacatgtatgacattcagttccgagacggaaagggctagacgccgctcgtcatgtctctggcctttcaaacaacggacggtaccaaatttccatgatcgagtggccttcgacttgtgagcatattgacactgatccggcgtgaaacatttggcttgacccggtctgtgcgatgccaatcgtggtaccgaagcagaccgatattgagtgccgactcacgcaacgacacttgcgcctacaagcttttctcgggcactgaatttgccggacgcaacatcgctagtctgatacacgtctccacgagtccaggttgcccagttgctccgttcggctcgagcgatttcctgaccgagtgcgccatcccgcattgtggttccttccgatgcgatgacaatatactaagatcgttctgcacagtctaggtcgaatgtctcgtctggctgaatgacgagaagcgctagcaattgattgatcggtgttttgttggctgtcgaatccgacctctcgccttgctttgacgaaggaacaccaggaggacggtcgaaccgatagaccgctttccatatttctgacaagcctttcgtattgcatgggtctgagctttcagatcgacactagtctatatattcgcttctcaactagttcaatcgggacgatcaagccattttacgtgcggtacattatcggcgcgtacggcgcgcctccaagtttcactggcaaacgaatccagctgacgttccacatgcacacccattgcgatactgttcgagcgcttggacggactcctgttccgcgcgcacagtgtacgaactgcattgcctcgattcggacaacgaagtgaggatgagtgcgggtcaagacggtgctcgaactgatgaagtccgtcaaagccgacgagttccgccgccatgatatcgtcaggatataccgcttcgggaaaatttactgcgcatatcggtcagcgctgtgacagatagtgaggcagttgggacgatcgtactggcgcggaataactgaatctacgtcaagatcgtctcggatcggaacacgttgttagtgggctcaacgttactgtcgacttactagtacaaggtgataaaaggaaatttgtagggtgtgtgctttgtgagctcgatcgacaaccacatgatcttttccgttattgccgccactcagcagagaagaactgtcattccaccagcactttttggaatgacactgatcagttcatgattgacattccaaggctactttgcagttatctgaaggtcgttaacaatcgactgagtgcggcaatcaatgcagctggggaaacaggtttcggtggtcagagcggctttgatggtgcgcaaatattacacaatttgcagctcgttgtgctgcgataaagaattccagccgagtcctttaacttgaactttgaggttcgtgagcgatgcgtgcaatagtggcaagctacagtcgacctcagaatcaaatggtccggcgttcatcctcaagtgagaatcatgccaaagaggccttcccatattgtgctactaggagatcaagagcatacaatcgacctgagttttgccctccatgactagatgatagtcgatttgcggttcataccccaggaaattatcatgcggggtcacaggatctttgcactgcttttccaagttgccctgcgattatcacgcgatggagaagaatcataatctatctctgcgagtccgcagcgattgaaaagttccctcgatgctcatgctcatctgaaccttccgatggatatccacagtttctggcttcaatgatgatcaactgtaggcactaaatatagacggtggagcgcaaagcccacagaatacgatcggtcactgattgatacctttgcatcgtgtgcgtaccctatttatcgactgcttcttcttctttcggaacagcaacactatgaaacagaacagctcagccagatcccgagcctatttgtgctccataccattgtatgtgtatgctccggcccctactatcatcacccaccgctctccaccatatcactcacggctgagacggtcaagggttcactcctcatgcgcttgttgagagcgcgcggttggcgctctgataccccttgaacccagcgagtgacctcctcgcggctcggatcagcgattacaaccgtcgaccgtgatttctgggcctcccgtatcgatttggacatcgtgtcgaccttcgcgcttcacaaatggtccccgtatggtgtagcgttgcaaagggagatgcttacggtacgatcgctcagctgacaccccgaacctcgtcccgtattcgccaagacaacgtagactggtgggtctctgaagcccttgctgacaccaccgaccgggccggtggattcgagtggagtgggaatcaagaatcatgcgggtcactgccgattgattagatagatctccagctctggataggagctgacactgtatctggggttgatagatctcctcgacgtcggtcaactcctacttcggcctcggggtcggccgatgctgcggtgatccgacgtggtcgatgtcgaatatgaattcgtgattacaagacagcgaccgacttgtcgaaagaatggcgcgatccaccagagtgcgttcgggggtttttacgtgaaaacaagactgccttcctgctggaccctgatcggcgattccgaaaaagcctcgtttctatcaatcagaacggccttgcctcctttgccggtggatctcttcttggcaatcggcaagttgttcgccgactaaatactgcctggaaccacgcagtcgatcatcacgcgcgtccacgtgagttggctctctcgaaatagaaaaacagcgaaagtgtaccatgtgattctctttttcgatctttcgatgacccaacaaactccccgtcatctctctaattgttggtcccggaccgacaaacccgcgcttttttcgcggaccatatggtcattgtcgcgacgggccgcagacgcaagcccgagcgagcaacaagcaggcaagagacaggaagaaccggagggagagttggagtggggcaaaagggtctcgcatggctccatccgcctcggaagaggagatctcgccatcgcacatccgccatcgtcggtcgctcgtgtgactctgacctcctggttggtccgactttcactccgcctcccgggtatcgataagctgttgctccactcgcctcttcctatatactcggacgtccctccctctcgagtcgaaaacgttacatctaccgtgccccgcacttccgctcccactttacgtttgattataattgaagtcgttacacctttgtcgcctatagtagtcattattgacacttgacaccctgacgactctcacgaacaaaacagacatagcgttctccgtgaagcccctctcactcacctagaacaaacaagcaccaagaaaaccttacaagatgcccatggaagagcccatggcccaggtgccggcgccgatcatggctgaaaaggcaggtcgggaagacctcccacctttctacgtcaacagcgacgagatcaccgaaaagaagtcgatggaaaaggcggaccaccatatgcaggacgccgaggtccgtgaacactactatgatcctctcagtgagtccaccccgtcgtccgaccatgtgtcgatcgcgtagtccgtgttgactgacatcttgcctccattgtttcccctttttatcccatgatccagaccctaacgatgtctaccctaccgaggaagagatgcacaccctgcgacgagtgccggacagggttccctttgccagttacctcgttgcctttgtcgagttgggcgagcgattttcgtactacggtaccaccggtgagtccaatttgttcattgagatttctatcttctgttatactgacgaccaatcttcttctttcgctagttgtcttcaccgttcgtgtctaagctttgactggcataaatccctacaccctcgctgaccaaatcgtatgcattttagaacttcatccagcgacctcttccccctggttcgaggactggagctggtggacacgatggtcaacccggtgccttgggcctgggtcaaaaggccgctttcggtctgaccacgttcaacactttttggatctacctgactcccttgctcggagcctttatcgctgatcagtactttggtcgatacaagactatccagcgtgagtctcgaggcgtcgtgtgcattggcagttcgtgaaaatcatcgagctgaatttatgcccctgcgtagttgccaacatcatctgtctcgtcggtcacatcttgctcgtcatctgcgctattcccggagtcatcgagaagaggtgagtgtgctcgccgcgaggaatgccatgccaatgtcctgacgacgccgcccggactcgcagcggaatcatcggactcttcgccgtcgccatcatcatcatgggtgtcggtaccggaatgttcaagtccaacgtttcgcccctgatcgccgaacaagtcactcgtcaacgagccgtcgtcgaagagcgcaagggtggcaaagtcctcgtcgaccccgcgctcaccacggccaggttgttcatgtacttttacctgttcatcaacgtcggatcgctcgtcggacagatcggcatggtctacgccgagaaatacgtcgggttctggttgtcctacctcttgcccaccatcgtcttcctcatttgccccctcatcctgattgtcggaaagaagtactacgttctccgtccccccgcgggcagtgtctagtgagtccgattagatgaggaaagcgtctcatcagcgatgctgattcaccttgcgcgacatgaagcccctccgctatccgtgtgatccgtgccgccaacaagggaaccttttcgctctccgccaaaaagatgtttggacctcgaaactgggacaatgccaagccctcgatgcagcagggtgaagctcccacctggatgaagtttgatgacgagtgggttgacgaagtcaagcgagcgctctctgcgtgcaaggtgtgagtatcttgcaggctcaatcaatggaaggcgaaccgcattgctaaacagtcgcttgcgcagcttcttgttctaccccgtctactggctggcttacaaccagatgaccggaaacttgacctcgcaagccgccgtcatggagctcaaccacgtccccaacgatatcatcaacaacatcaaccccatttccctcatcgtaggtcctatagcgggtcttctagagccggaccacagctgacccggagagatctacccgcagatcttcatccccatctttgacatggtcatctaccccttcctccgtcgtcacaacatccgcttcacccccatcaggaggatcactgccggtttcgcctgtgcttcgttggccatgatctggtgagtaataggtgttcccgctcaagtgcacttggggctgattgatctggtgcaattctcagggccaccatcactcagctgtacatttaccgaatgagcccctgtggttactctgccaacacctgcgctaccgccgacggcatcgtgagtacagactcggctggttccatcagacatgttcgaagctcaacgagaccaatcgcgcctacagaccatccccgctcccatcaacgtatggtcgcagatcggtgcctacgccctgatcggattctccgagatctttgcctcgatcaccctcctcgaatatgcatacactaaggccccccgtaacatgaggtctatcgttcaggccttgtctctcttgaccaacgccgtctccgctgctattggtgaggccctcgttcccctcagtgacgaccccaacctcgtctggaactacatgacctgcaccatgtgagtttccgcgtcgccgcttctgctcgtgctacccttcgcctgctgacagacgtccgcgacttcgctctcgcagccttgctggtgtcggtggaattgccttctacttcaccttcagggacttggaccgacaggaagaaaccctcaacgagcttcccgagggtcacgtctggcccaagggcaggcccgtggagaccgaggaggagcaggccaggtaacgatcctacgccgatcgtgtcaggtttggtctcttttcgcacgtcgttggaagcgaggagggaacaagatccacgggtatttgtccgaagccaatcgttgttactctactcctatatcgttcaacgtttgttccaaggttgttttcccgtcgagacgtgcgcctttgtctctctcgatgtacgcaattgtataatgatgagccgagttcacgcggtccgtgccaagtctgctcagacgaggtgatggtgtcactcccgatgaaagttcgatttcttgccgcatcggtgcgcaatgtccgtgaccgttgccttccacccacgaacccacttgctttgagatgttcaaagagagcggatgctgagcgcggactttgcgacaaccgttacagggcgattcattcatggtcatcgtagtggtcatgcttgcctgctcatatgcgactcgtctatttacgctctttgccagctgaaatggacccggtcactcttcctgctgaccattgtactgtgacatgattgatgaccaactcatacaggtggatcgtgattgtcaatgtgatgatccaagacctctttcatgttgcgacgagcttcggtcatttattcgctagtttcatcttcacgaggcgcaagctgacctatccatgttcgaccacgtcccagcagtatggaacctagtagtcgtagtctgaatgagacccgacaacgatgggctctcctgtatcgagtgtacgtgtcgcttcgcagcttgcttggtcaccctcgacctcacggatacacgatgcccggtgattgattgataatcataatcgcgcggtaacgttgatggataatctacttccgacggtcatcgttcgagtatatgtaaccggacttgctcaaccgattctatccaggtggtggtcggaggtgatcgctccaacacacacaaactcgaacacgcaccgctcttgcttctactttcgctcccctaccctcacctctacgcccaaacacgaccgcaaccccgatcaaactgtatcgcaatgtctgacaccaacgtcgtccttagtaagcctgtgctcgaccgtcgaccgattcctcctcatcattctgacccaatgttcctcaccaacttcgcgcagtcacaggagccgcccgtggaatcggtttcgatttggtcaagctctacgcggccgacgcctcgaacacgatcattgccggtgtacgtgacacgtcgaccgctagcaagctggacgaactcgccaagacgtccaaggccaagattcatctcgtcaagatcctcgctggggatgccgagaacaacaagacggccgccgacgaggtcgaaaagttggtcggcaaggtcgacgtcctgtgggccaatgctggtgagtcgtgtcgaacagaattcgagtcgaatcttcttttttgctgacatcgcgcgatcgattcgtgtaggtatcgccgagaagcccaagccgatcctccagcttgacgctggcgatatgacccgtcactacgaggtcaacactctcggtcccttgttcttgttccaggccttctacccgctcctgcaaaaatcgagcaaggccgagaaaaagttcatcatcactagtactctcgccggttcgatcggcgcggccattccgttcccaattacctcgtacggggcttccaaagccgctgtcaactttgtggccatacatgttcacctcgagcacgctcagcaggacaacatcgtcgtcgtccccattcatcctggtgagtcgcccggccctctctcgattgatccagttttttggtatactgacttgacattgcatgacgtccttgcgtatccaggtatggtcgacaccgatatggcttccgctgccattgacgaatttggcggtcgagagaacattgccaagatggggatcgagatccttagtcccgaacagtctgctaccggttgcaaggcggtcgccgatgccgcgaccgtcgaatcgcacggcggcaagttctttgactatgccggcaagagccttccgtggtagtcggtcgaaacgatcgcacggggttggaccctgtgctgttctatagaaaggagttgacaagctcttaacgcgataccattttgtttctattaccatcttttccatgtcatgttcaaatatatcgcatatctgaaaaagtctaagagatgtctcgtatatcttgatcctcctgttctgcaggtcccggtcggccgattgttttggagtgttcactgagtgaacctaccattccgcccgcaaaccaaagtattcctcagcgccgagtaacgagcagacaaaggataccctgacgatgtcgttgataaccctatatcgactcacaacgttcggtggccgagtttcgcgcggaagctaatttcacaaactttgcccggtaacaaggtcagagagctgtgaggtaggacggcctgtctataggaatcatcatccttaccatacattgtcgtccggaaacgtctacctggcttgatcgggaaaccctaccctgcagtcatgtccaacccagctccagatttgtactatcaaaacccgccacggccaggtagatcgtcgatctcgctcaggcgggacgaaatctctccactgctccttcccaagcaccaccgaggtcacgaggaagaggaatgtgacgagatcgatcagacgttctggggagccttcaaagcgctttcctcgaatgctgcgccattgaccatcggatttctcctggaggcttgtttcccgctcgtctcaacgttgatcgccgggtgagttgtcgaggggccgagtttggcaacaacgttcgtagggctgatcgacgaattcgtatttctgtgcaggcggcttggacctggcgagctagcaacggtcggacagggaattcaaatcatgggagtcactaccaccgtcctcatcctgtcttccaccgcagctcaaaccaccctctcggcaccgcttttcacctcgaaatcgccctcgagcaaaaaagagatcggaatcatcgctcaacgaggtttcatcctcgcccatctctgcgtcttgcccatggccatcgtctggtggttcatccgacccatcatgatcgctctcggacaacccgcaagcctggccatcggcttggaatcgttcctacgatggatgatgctatacatcccgggatacggtcagttcgatgattactcagggctttgcctcgacgctgtctgactttgatctccttctttgctttttagctctgatggagacgtcgaaagcctttctccaagcccaatcgatcttccacccagcaaccctcatcgtggcctttatcctcccctttcataccgctctcgcctatttcctagttcatcgcaccccgcttagggagaacggtgtggccatctcggtcgcctcgtcatacagcctcatcggagtgcttcttgtcatctggatcagccgtacggacgctagagagtgttggggaggttggagtaggagatgtttggatgggtggaaggcttacctgcagatcctcattccgagcgccatggtcagtgaggtttgctttgtatgcgggacttttcggagacgctgacagggttacacatacggacaacagatgttcgggtcggaatggtggagtttcgagattgtcagcttgatggctgggcgattgggcgagaccagtatcgccgctcaggccgccatcacatccagtaagtcccgctcttttgttccgttcacgtccatgcaattgaacgtggctaaacactcgttccgctcacttacagtggacatcttcctcgcaatgatcccatacgccgctggtctggcttctaccgtccgtctcggccaactactcggacataacactcctcaagcctgtcgagcagccaaagtgaccgtgcgtgctgcctacgtgttcgccatcaccgtcactgcgttcctcgctaccggtttgctcgtcgggaggttctggctggcgggactatacgtcaagggagagggcaagagcgagaatgaggttaggagcttgatcgccaatgtgctcattcctatcgccacgtgagtcacgtcgcttgccccgtccttgcatgggtacaccaagctgatcctatacatgctccttctcctggacagataccaagtctccgatgctgtaagtcacatccccgtctcatgcgcgagtcctcgtcgacacctgactgactttgccacttgccccgccttcacaggtcgcaagtatcggatcgtccattctccggtcgatcgcattgcagaatcttcaagctgtcatcgtcactggctcatattacgtcctcgggttacccctcggttactacctggcttatcgacaaaattggggactggtcgggctgtggactggtacctcggtcgggctcttctgggtcggagcgttcggggtcatcttctattgcgtccgcgtcgactggactgaagagatgagacgggccgtttggcgaagtcgtgggaacgggttcgccgtcctcgaagaggaggacgaggaggacgaggaaggttccgaagaagacgccagtgagcgggattacgggaccatgcggatataagacgatcgcttcgggctgggtgtaacaacatgaccggcatgaataattagaaccatgtagcatacgggtgggaacattcatatatataccttgtcgacacgcagatcgacatgttagggcaagctctgcaccacgttgaaaagacggatcgtgatcgcattcgacagagatgtacgacgcggcagcgaagatcagtgactattgaacctggtccaactctggacggacccagagacggtcccgacgttatgaagtccattccttttgtcttgttctggggggcagcctttctggccaaagactttagtattggctgtcaaacggcgggttcaatgtgtagtccaggaaatttaggcaaggcatgcagtcctggctttgggggtggagcgacttagactcaaccacgacatgacacggcttgttctgataatctgcgaaccttcacttgaccgaatcctcgaattgagtctcagtagggatcttgtcttgtcttgccaccatcagactccctatactgcctccctgtcctcctgtgatcaagggtctcgtcctgttctgtcaatgtccgatctaacaatgaactgtctgcgagaatgagcgtcgaacgtgttgaaaatcgtgttccaggctctgtaagaagctcgttccaccaacaagtccacctccgaaatcgcaggcgtggcgagttgccgattagacctatcgcatcgcttgttgcatcatgacaggcgcgtgtgtatgcacaacagtcatcggtgtcaggtcgatctcgccttaaagagggaactgtctgtccagcggtctcacacagaccgtttcactagtggctacgagtacgccacgcttttatccgtcataccactatcggtataaaagcgcttgacgtgcaaaagtattcgctttgacttgggctggcagtgtgcaagaaccgatcgaagcgtagtccacgccttctccaggccgacattccactcagagcgccacgctcctgggcgcataagtctctctaggagtgccgaatccttccgggtacgtcactgtatgcgagcccgattcaaccgaatccgatcgtcctggtgagccggcttctcgagcatccgaaacatcgtctctaagccagaattgtgaggctcgactactgcttaccgatcggatcgctttccatggtacccgtcgtcgaaaaagcacagaggtcggtccagatccgtagatgcgcagtgttagcatataatggtagtctaggtaaagacaatatcattcgagacacgcttagcgattcacaccagagatgatgcctagccagaaccatccgtatctccccgggctctacagaagatgagcgaaccatatagacctgtggaatttgctggcatgtgatcgcgatttacgtactccaaggatgagtgggttgtggctcttcgaaccatcggtccttatggctagtatcactgcagctgccaaaaccgaccttcggagctgatgcttcacgtcacgctcgaagctctcggtggggccgctcatctctgtcttgactcgttatggtcgtgccctgctgccgtcgggatcgaccaagagcgactgccaggagcaaggcgcgtcgtggctgtggaagaaggtgatgcagttcgcgcgagttcgcttgatgcaaaccgagatgacgatcgaggacgatccccctgaccaaagtttctgaaaccagtgcaagtaggcttgaaacgctcatcatcgggagctgcgatgacgtacgctgcggttcatttccacgagaacgtgatcgtggcgttctgtcgaccccccggcgtggccgaaccgaaattacgcgctaagtcacgcaatgatccctcctcccgcgcctgggcccttgggtggatccggtgagtagatggcccgaatcaactccgcgctccttgttccgccgagctgcaccgccaccgccccccccatctggcctaatctcggatgcaaaatggaaccccttccctgggaaatctcgcttcgagaccgatcacccgctcttgacctcttgacctcttttgtcgagtggaggaccagccacctcttgactacgacgacgacctcgacccccgtcaactgtctggacctccagagaactgtttatttgtttgttgacaaacgtctgacaacattgctattgctaggaatcggacgatcaacgtctcttacttgtcgattgcgagaattgatctgcagtagttgccaagcccagacccaacgtcgaggagataacccccccaatccagcctcttgacgccagacgatctcgcacctattcgtcgagggctatcacaggcaagtccgtcattcgagctttactgcgaagtggtcaaagtctttcatagctgaccggcgcctctctccgtctttcccacgcacacgcccacctcctctcgccttgccatcggacctctccccctgctatggcccggatcgaatcaactcggcccgcctctctacccgaacccgaacccgaacccgaacctcgacctcgaactcggtcttgactcggacttgaaaccccgtagacaaaggaacctcctcctcccaaaccctacgctctcctcggaaccctcttgtgcttcttttacccctgggtgtaaagcgtcgcagtcggcatctggatctctacctggacttgcagctggagaattgaacgtacttgcgatcacaacatcaacatccacgtcgacctcgacatcaacctacagtcttcggtgacgtcgagactcacgacgtagcttgacctcgaggcaccacaaccgccattacactatcaccgtcgctttctcgatcgacgccggacggtgaagactcatctacctgacccttcggaacccccaacctgaacccatccccgcactcgcactcgtgttcgtgctcaaagtcgaagtcggttggatccgtaccccgagttccaatccttacccggtgagaacgagttccgtgtgcagacggaccgacggacggggatatagcagggatatctctctggtacgggaattcggactggacctttgaatttgaggtcgaactcaaatttggatcagaattcgatctcgacctcgactgcggcatcgacgtcgacgtcgacggtcgtttcctgaaaactcgaaattctgggggagacgtgaaaagcaggatcgcaaatagactcgtacggatcgacgtgttgaaacctacccgcaagacgagccggatcgatattggggcccatttctaatcaggatcgtttcgactctttgaactggtcgagacgagggggaattcgaggatagcatctcgatcgctgcgcgtcacgccgagcaggaccgagacaacgccgttgccaacaccaacagcacccccgacccaatcaccttatcaaccacctcgcacaacctaccatcaaatgtctcccgcccctcaccccaccggcgttctggtcggacgacaagccacgtcggctatcgacgctcctacgtctgctgcggccgagacccccgttgcgagttcggcggaggaacaaccgagtgctacgtccgaggtagctgggacgagtgccgtcgtggaacctagtactagtcaaggtgagtgagtgtgtcagtgtcgttggcgttggcgttggtgtatgtgtgtgtgtctgtgtgtgtgtgtgtgtctgtgtgttagaagcgcgtgtgtatgttttcgttagcgcgcgcgagttgtctctcccctcaaaaacaaaaagaagcaagcaggcaggcccaacttggttcggtcgacatcgaccatcgacctggaaacgaaggtggggacccatcttatcaaagtagtagtatcgttggcgacacacaccatctcgctctctccttgaactcgtggagatctcgttcgagatagactcgatttagtcaagaaaggaaaggaccaagaggacgaccaccacgaccaccactcttttgccatcttatttcccttttgggtcatcacgcgtgcactcgactcgacacagcacaaacacacgatcaacacacacacaacacacacgacacaatacattcacttgatcatatcgacatcgacgacccatcaatacattcaacacaccttcaatcggcagcaatcagcaagagaccacgatcgatcgatatagaacaacgcgaacagcgacgacgacgacgaacaaccgacgacgatgagtggtcagtgtcgcccccctcccggccaccctttgtttctttctttctgttccgaaaacctgcttttatttcgacgttttcaccggtggcatcgaggatccgggatccaagacctgtgattacgatcgcgaggaggacgaggaggaggaggaggaggaggaggaggaggaggaggaggaggagatgtggaccccgaaagaatcagaaaggaggggaagatgcgtctctacgtcgattcgcacgacccattcgtcgtccggatcaaatcaaatcagatcggatctcatcaaggttgttggaattgaacccggactcgtagtcggggcgtggtcagccaggaaagagtgcacctggaccccttccagggccggacgacatcgacgttgacgtcgacatcgggaaaggaaaggaagggagaggaagggaggggccgacccatcagacacacccccctggtggaacaccctcttccaatcccatcgaaaccctcgtcggacctcccgaattcgccgggatggattttctacatccggatttgggttcccggttcgggtcgtggggtctggatggcgtgggatcttctgaaaaggaagtgcacgagcagaatctcgtcccgcttcgggtccagttcccgatccggctccgggttggggtcagggggtccacctcggttgacggtcgatgatcgagggtctgagctgggtgctgggtgactggtcccggtctgaatacgctctgcgaggtccaggtcgatcaggggggacagtgttgtgtctgggcttgaggttatgagacctacgacggcaggaaaggcgatagaagaggacggacatggacagccacgtacactgagagggaaggacggtggacgaggtttatcgcgtcttgctcgttggcggccagcggtcattgagtgtggtacgccaggggtagctggcggggacttggtcgaaaaggccgggttaccgtcagaggagagtcgagagtcacatcgcacacacgcacacacacgtacacatgcacacacacacgcacatcatacacgacctgatgacagaccgacattgaccaggaaccggcgtatactgacagatccctcccttgatcttgctccacagcccccgccacgtccgcccctgcgacttcccccgcggccacggccccggccactacggccgcaccagagacgtccccagacccaacgacctctcaaccggcaacgacttccaacccgcctacgtctgacccacctacctcgcaagcacccgtcacgaccccggccgtgacgaccaccgctccgaggacgacggctcagcagacatcccagccacccgtgacaaccgaacaacaacagacgacgcagcagcaacagccggatacgaccgtcgttcagagtacttcgcaaagtaccgtcatcgtcaccgttcccgggaccaccgcaccgggtaccaccatgtgagtcctacgtctcgtcaaacaccggtaacgcctgcgtcgaccctgacccccctgtcgttcgcgcgtcggttttagccctcctaccacccaggaacaggtcacgaccgtaccgctgtcgcaatcgaccttggtcatcaccgaggtcgcctccagcggttcgtccaggagtactcaggtggtgaccgtccccgccagccagggtgtcaccagcgcgcccacaagtaggaccaggtgagcaacagatgcagctcgcatcgtatgctgacgagctgacttaacgccactcatagcaccctcactttgcccgccggcgtgacgtctggaatcgtgacgaccgaggtcaccgacgccatcctcgtcacgaccaccaacgaccgtggcgagctgatcaccacggcaccggcgaccatcacctcggccgtcgttcaatcggatgccaacggagtgttctacaccgtcacccagatcgtcaggaaccctagcgggagcttgaatgatgggagtggcaactcgggcggaggcacgagcgcgttcttcaacaacaccggagccgtcgtcggcgtctttgtcgtcgtcggaattgcgggagccgccatcctgttgggctttgggttcttgttcatgaggcgaaggaggaggcagaggttggacaggtgagcaggcgatcgatgttgggcgcgtctcgatcgacacctcgctaaccctcggacttttcagggacgtcgctgccgctgccgctgctgccaatgccgccgccatgcgcacgccattcgaggacgacgaggacggtgtcggtggcaatacctcgttcaacagctcgagcggacctgccatgacacagtacggcggattctacgccagtgacaatggccccggtggatacgaccaggagcgacacggcggatacgatccctacgccgccgccgctgccggtggaatcggtgcggctgctgttggatctcaccaataccacaacgatgacccctatgccgacaacaatgcgcccaacgctcagggcggcgcttactacctcgaccccaacgattacgactacgacaaggcatcccgaagtgaccaaggattcgcgtacgaccagcccagtcagggtcactatgaccagggcccatactcggatgttccgctcgccgctggtggtcagaggtcaaactacatgctgagcaggcaagatagcgagggaagcgttggggaccatgcaagagatccgtacaataaccgtggaggcccgctcaaggtgagtcgatcgggcgcgtctttgcctacactcgcacactgacgacgtgagcgtttccaatccaggtcgccaacccgtcagacgattagtcgtctcgcgactcccgcatttgatccgtcacaaaaccgaataccctctcatctctccatactgtgcccgtgccatgcgtctgtttcggtcattcaagtttgtatctccatggacttttaccatctcgccttcccgtcctcgctctgccgtgtcactttatagtagttctagttggatgttgtcggcggtctgtaacctctcgcttcgactcgatgaacatgatggcgctgtcgatcagagttgtgttcagcttggttcgtcaaccaaatgaagagtttcttatcaagacccttctctatccgttgaaccttgaatctaagcatgatggcacaccaggagaggggtcaatatgggccgagaccgacatgttgattcggtggcgtggtcaggccggaacatggatgtacattagcacgccaaaaagtcggcgcggcttcattaccacgatagcaatcctgaacacaattatcgactgagtgtatcgattagcagagacacaagaagcggaacagagaagacgctcatcagaactgtgccgcgcttgcgcagtggttggcaaaagcaatctctggcaagtcctttgctcgctcggccatatcgacccagctgggctgacctctgcgttcccttcgaaattgcggcctggtcatgctacgagcgggtctcgaggctcaagtactcgagacaggcgcgaccgtcgtggatatcaccaaaaaggttcacctggggacaccgagacggcatagaacaatcggacaagctggaccgcaagtgaagaaattcaagtggcaacccgaggtctaactctagaagcctccgtgctggttcgtgtcttcgacatgtaatcatgatcatgcttcaaaacaaactcgtttcatgctagcaacacgcttcaaggcgaagccatcagaacctgcaatatcacgatctttagctctcactgaagatcttccaacgagacacacgacatgactcacggcactgggtgtcaggccgttatcacgcaacgacttgttcatgtccccgggtccgaaggtcttcctaacaaaggagaagcgggtagaagatcagacgagcagccttccaggaccgaggaccggaaacgaaatcgggactcgccttgggaacgtcatggacagcttgaccgagtccgagttgaaagagagattttccgaggcgatgaattctgccacggccgagagagctgcaaagtgggcccggttgaggtactgcccagaagtttgggaacgttcgactactcacgactatctgatggcagcgttttggtcaagggagctcctccggttgacagccggatctatgatcatcacctatcccatcagtgcacagacgagccatgcccacgtccacagcgtacccacctgcaacctcgtctctgggtaatccttgcccttcatgccaccgcctgcagccgcagcgatactcgccgcaccgcccaccgcaggtcccgacccggctgcggcctggggaggctgttctcctgccctcaatgccttttcccgggccgccttttcagctcgtgcctttttatcggcctgtgttccgggcacgcacgatcagtcgctcttctctcgttcccgaatgcaggcctgcgcgggacgtacctcgatctgcaacttgaccgccgccctggcctttgcttcgagctccttgtctacgacgatccgagcggacaaggcgatggcgatcaacaggtcgttcgcgcaccgggggtggggacggggtcaactcacctttcttggcttgtacggcagctttctccatttccttcatcttgagatcttctttgatcttgccggcgtcttgaccagctttccgtcgcaagagctgcgatacgtgtttgtcccatcatcagcgccgcccgatcgatcggtcaaacacctgaaggggacggaatcgggaccgacctcgtttgccctgttggctttggcatcatcttccgcctgcttggctcgtttctcaacgagcttctttctcaggtcttccaactttgcctttcgttcttcctcggtcaagggcacgtactgcgagagtgttcggtcgacgaggttcgtgtgatcgtggtcgtgatcgtcagctacaaaagtctttgagcccgacatgttcagactgacctcttctgtggattcctcaaagttggaatgtcccgatttctcggcatggaacgagaccaacgaggtgtttttaaagatcttgccgcactgcccgatgcgggaaaaacagggtccccttttcgatcagccgactggtcctgacgtgcatgaggagctccaggggtctgactcacgtcggtacatttgacgctcttggcctcgacatcgtccgcctttgaggggtcccctcccatcttcttgatatgcgcttgcaatgcctcctgatcgtcctcgtcatcgtccaggtccataggcttgtccgacgtccccgtaggtgcgggagcttgggaagccgaggtatctgtagggactgggttgtccatgttggttacgatatggtcgagagcgggctgtggtcgggtaggttccaggaacgtggtcggtcagcttgcgaagcgtctcgacctgcatagggtactcacctgtagtccggcgttcttggtcgccctcaaagcccctggacgagtgatcgtagggccacatcaggatactgtacttttactctaggctctaggatgtgggcagcgttcgatcgagctcacaatcgatcctgtccgcctcgaaccccatgtccatcagttgagctttgtcagatgccatcgtgacgcgagtgtaggtaggtggtgacgcggttggttacgatgtcgaattttctgcaattgaatgggtgatactggagcgatatcgtagctgtagctaggtcgtatcaggtcagttgaatgaggtcaagtacgtggagagtgtagtagtggttgtgaatagatcactcgattgagccgtgcccttgtcttgtctgtttggtaggttacgtcatatctcaccagaaccaaccacgacatcatagctagttcgacgatgatgatacggacttaggcaagaccctagactagagatcacatgctacattactacgtgtacgtgtctatgtgaagctacatctctacatcagcgatgaaaccatacgcacgcccctcgtccgtgcctctattggaccatctgaccgaccccccccccttcaatccgcgcgccatcactcgactccgacctcgtaccgattcggtttcgtcctgttcaacggctttgccttgctcttcttgctgctcttgtcatccttgcgcgactttgcccgtttttcatcctcggaggaagaaccggcggacgaggtctcgtcgtcatccgtagcttcccctttcatgactctacggacgtggtcggcctgtttatccctaatctttcgggtccaggtcgcgtccacctcggtttcctcctcgtcctggtcgtcggcgtcgtcgtcgtccagtcgtaccgagtggtcagtcgaggtagagggttcgtcggccgtcgaggtcctagcgagggggatgcggtcgtgatcatggtcacacgtctcggcatgtcgatgcgcacgtccttttccctttccttttcctttccccactgtcctcgccccgtccgtatctctctcttttccctgctctttctctacctcgccatcactcccactcccactcttatccggctttgtcgacctgggtagattcccacgtcccgtcccacctcgataggcatcgtcagactcgctagagctggaccccgaggattccgaagaagattcgtcaaactttctaggtttatggtatatgcaacagactgtcggagggtttggtgtacgaaccgggtgatcaggatgtaagttgaatcagccggtcgatctcgtcttggtcgcgctgcatcgagaagagaccattttacgcactcttactgctcttcctgcccatatgttcattatcgacgacatcgtcatcccagacgacccttctcctccttatcggacctcctctcagacgcaagaccttgacttggtgagttgacccaatggaagacgaccctggttgttgatccgggttgggagtcggagtggtcgatgtgatggtttgcgaacccgagggggtcggggaaggagcgttggtgcgggtgtaggttgttgggtgatgcgacatgatgggcgccgggaatcgaggaagggatgttgttggcgctggtttgactttacagcgttgttatagtgtgtgactggttctcgagagtgtcggatgagatgtgaacgaaaggggagtggtatcgaatatggtacctagtcaagtgcttgggggtacacaaggtggccgtggttgcttacgtaattcactcggaaattacaaaactacctaccacctatacacctatacacctagatgttggtaagtataaggggttggttgatcttgcatgctaccaaccacaactaggtcactacgacagcactgaaatagcagtaacacgacagactggcagaatgtcaactccgactcccgttgaacccgcagcttcgacatcgacgacacctccagcgcccacatcggctccttccgaccctaccaccgccgctgcctcgtcaacttctcaggatgccgaacccaaaaagaagcaacccatctgtatcgtcgtcatcgggatggccggatccgtaagccctaggccatgccgccgtcgtcgtcatcacgatctgacatgctcgctctcgacgtcgatgacagggcaagacgaccctgatgcaacgactcaactcgtaccttcactcgaaaaacaccccgccctacatcctcaatctcgacccggccgtcacccatatgccatacgaagcgaacattgatattcgggataccgtcgactatcgtgaagtcatgaaacagtccgtaccacgcccacgctgggtcgtcgtcgatgtaacccataatctccctggcatgactaatcggcgtccttcaaccatcttccattcttttccattcacgaccttgacctcgacctcgtctcgtgggtacatcgtgacgaccacgacgacgacgcagatacaacctcggacctaacggagggatcttgaccgcgctcaacttgttcacgaccaaattcgaccaggtgctcggtttcgtagagaaacggagcgagagcgtcgagtgagagtcgtccccccttttcgtcatcccactttccgctccacgccatcgcccccgtctggacgatactgacacctcccctcgtcctctcactaccaactccgtccctcaccgctcgacctcgacctcacagtcatatcctcttggacacccccggtcagatcgagatcttcacgtggtcggcctcgggatcgatcatcaccgaatcgatcgcatcgtccatgccgacctgcgtggcgtacgtgatcgatacaccgcggacgacgtcgcctagcacgttcatgagcaacatgttgtacgcttgttcgtgagtcgtcgagtctttttcttagaacagagaaaaaggagaggagggtcgcggctctgtcccttgaacccaagatgggggtgagggtgggtccatcgggaagagcgagactgacccgggcgacttttcttgcgatcatgtgttttttcctgtccggcgggttttaggatcctgtacaagactcgactcccctttatcctcgtgttcaacaagaccgacgtgcaaccccacgaattcgccgtcgactggatgaacgactggcagcttttccaaaaatccctgcaggcgtctaccgagggcggcgatggggaagctaattacatgaactcgttgatgaactcgatgtgtctggtgctcgacgagttttacgaaggactgaggacggtcggggtgagcgcgatgacgggtcaggggatcggcgagtttttcgaaaaggtcgaagaagcacgggcagagtatgatcggtgagtcgcgacggtggaagacggtcgaatcgatgtcggactgaattcggatgggtcggttcgtagggattaccgtccagagctggaaaagcaggccaaggaaaaggtgagcccgcggcttccaaatgggggatccatccccgatccatcgattccagcctacactcccttgctgaacatccgcccttgttctcctaggcggccaagaaagaagccgacaagcaatcccaactcgaacgtttgatgaaggacatgtcgacgtccgaatctacacggacgtcttcctcttcgatgccgggcggacggacgggggacgatcgaccgggaagcggggtcaagccgggcaagaacccgtttgggcctcatggagtcaacgagcgggaagatcggtatgtccccaggaatacgaacgcgaatgcgagatctggcgagatgagaggatgaaagggctgggtgcgtgctcacgcggtccccccggggtttctctgttttttccggtagatggtacgaccaggaagatggtgagggtgacgaggacgaggatgaggacgacatggagaacgacgacgagctgggacctgatgccgatagaggtgagtctccgttttgaccgatcgatttttcttcatctttcgagaactgaagccgctgcgctgccgtgaattagaacaaccttaccctggtcagaggagattcggggatcaagggtttgaaggttcgaactgggctcgacctagttgatgttggtcggtcggtgtatcgagccgatgtatcaagtgggcgacgagacggggagacgccaacctgcacaagcacgcacgcacgcacgcacgcacactgtaactcatagatatgcgagtgataattgacgaccaatgacagttgttgccgggttgattgtggaatttgtcatcttcgatgtcgacaacctcgactttgtggatttttctccttttccccaccttttgcgcgtgaaaatcagagtttcgagcttggcacccacctcgacctggacgacgaccaagacataagataacggccaatgtgatggctttatcatcactaccactctacctgaccacactctgaccaagtgggacatctctcgtgatactcctctacccgtgatcaccgccatcaacctggccgccctatcaaacctccttgacctgcctctctttgaccgatttgcacgacctcgacattatcgtcgacccgcgcaggacgacgaccaagaccaggaccaggaccacgacgacgacaacgacattactcccaccatcaaccgctcatccctctttgatcgggctggacttgtaatacatcgtcaagacggtcgtcaagaagaaggagatcatatccctctcttaccgctccgtcacgatccctcgaaccggtcgacagtagcgagcagcgtcaattggaaacgaagagacggcaggatgaagtttgggtacgtgatctcgagacctccctcttggctcatagattcagatagatgggtattttgctaacatgagcccctcgtcaacctgctgtgcctgctgtatagtaccctcctggagctcaattccaacatcgagtggttcgacaaatacgtcgagtgagtccatgcatgggcgacgaccccgtgacaaacgtgccggacgttgcttgaccgtgatcgaccgggaatgtcgcatactgacccgtccacctcgtcttccgatgtcggtcttgctcagctatgatggtctcaagaagatgttcccggccgagccgttcgagccttcttatcgtgccactcgtcaggacgatcccgaggcttccccgctgctaaccgccgagagaccccagggtgcgagcgaagaagagttcacctcggctctcgatcgggaacgaaacaaggtcatcgagttttacaaggaaaccgaggacgaacttcagagcacgttcaagacgatcctgggcgaggtccgggttttggaagagcgagaattcgacgacgtcattgaagaggaagacgaagacgaggagggagcgagtgatcgcgagacgaatcaaggtacctcgggattcaggagcagtcaagacggtgctgggcttgaagaaggcctccctcctaccaaggcccgtcgatcgtcctatacccctcaatcgcctcagctgaacaccaacaagtcgttcatgcagaaaaacctcgcttcgttctccaaccggttcctctctaccgatcctcatagggacgaagccgacctgctcgaagcctccttgaccccacaggtgcaacaagagacccgagctcgatcccgctccaacgcccgtcgagcccggctctcacgtacgggcacctcgtccgatatcggccgacgtccttcttccaacgacgagaaccgacgcatgtccgcctcatcagcttcctctggcggactcggacccgccgcgagcatgtcccgtcatcgtggcaacctcggcttgatccccatgaccgatccgacccccttgtcggatagcatcttttccagctcggccgctgcccatagcgccggaggtccgaggttgtccggtgacgatggcgacgcggtggattacatctggacggccagttcggattacggcaaggtcttgaggatcggcttcaagaagcgtatcgcgaggatgtggttggacgggtacgctctcaaggggtatgtcgagttgaacttgacggcgtttgaaaagatcctgaaaaagtgagtccaagcgagacgtgtgtgtgtgtgtgtgtggcttcgttcggccgaggcgtttgtgctgatgagccctgaatcgatatctacaggtacgacaagaataccgggtccaaagtgagtctcatgcggtccctttgacagacgcccagtctgaatggctgacgtgcgcgctccctccacgctacagctcaagaagcggtacatcgaatccacggtcatgacctcgtacccgtggcagaccgagaccaaggagcatctcgaagagatcatggaaaagatcctgtacctctacgcgagggtcgccgccggcggtgatctcgaactcgccaaacaacagcttcgggcgcagcttcgagaaaaggtcggtcccggcaatcaggactgattcccgctcctcttcatgtgtggctgacaccacgctcgcttcctctcgcagatcgtcgtcgaccgagagaccatctggtccaagatggtttccgagcgaagacagaacgacggtcagctcaaggtcgtgaccgagggtcattcgtcgtcggaaaagacgcacagcctcgtccggaccccgttggggagcttgcacgtaccaacctggttgagctggaatgggatcatctgcgtgctcgccgccatcgtgctggtcgtcatcatcaaggtcaaccctttcgataaacaagaggagagtaattgtttggccatgctcatcttctgtaccttgctttgggcgaccgaggtgagcctgcgatcgccggagagacactttcaggggaggccaggcccttcgctgactttcgctggccgcattcataggccatcccattgttcgtcaccagcttctttgtgccgttcttgacggtcgcgctcggcgtactccgcaccacggacggcaaggacgagaggatgcccgcgagtgaagccagcaaatacatcttctccgtcatgttttcacctaccatagggctcttgctcggtggtttcaccatcgcagcggttctctccaagacgaggctggatgtcatgaccgcttcgagagtcctcaacgccgcgggatccaagccgagcgtggtcttgctcaccttgatgtgtattgcgacgtttgcgagcatgtggatcagtaacgtcgccgcacctacactctgctatgccctcatcaaggtatgtcctcctcccactcgagagtggtcgtcatccagctgagtttgtcacatggccgatccagcctattacggatgaactaccccccaagtcggctttctcacgatgtctaatcgcaagtcaaacgatattccagcaaaatccacggttcgcagctcacactcgtgtaactcgtagatcgcaattgccctagcctccaacattggcggtcaggcttcgcccatctcctctccccagaacttgatcggtcttgcggccatggatccgcctctttcgtggttgcaatggttcgccatctcgcttcccgttgccaccgtatccgtcgtcgccatctggtcgtacctccacatcggatatcgttgggagagggatctttcgattcctcgtatgaggaagaacaccgaccccttgacttggacgcattggtatgtgttgtttgtcaccgccgtcacaatcatgctctggtgtatcgagaaaaagttcgaagcctgggttggagacatgggtgtcatcgccattatccccatcattgcctttttcggtcccggcatcttgtcaaaggtgagctttccgctatggaacgaagccagtcgagcagagattgatgcattgcacctcattcgcgtcgcagcaagactttcattccttccagtggtcgatcgtgttcatcgccatgtcaggatcggcactgggtcgggccgtcctgtcgtctggtctgctggatgatctgaacagggtcctagaaaagggcgtcgagggtatgggtctgttcagcgtgctgttggtctttgcatgcatcagtttggtggtcgcaactttgtgagtagacggcggatttttgaaaagcggatccgcactgaagttcagcatcgtcgcagcatctcgcacactatcgccgctgtcttgcttgtacccattgccgaaaaggtcggcgaggggttggccgaccctcatccccgtctcttgatcatgtgttgcactttgatctgctctgccggtatgggtcttcctcagagtgggttccccaacatcaccgcgtaagtctgcctcacgtaacgtctgcccagaaacacgaccattgacgtctctatcacaatagtatcgcacaagagaacaaactcgggcagcgatacatcgccgccagtgatttcctcaagaatggtatacctgcctcgatcctggccaccgcagtcattgtcacgcttggtttcggtatctccaaggccatcgggtatgttacgaacgtctcctcgcctgtcctagtcgcgtcgctgactcgtggcatgtcgttgttcacagtctataattcaacgataggacctagtctcgatcattcgatcctgtataatttagagtgcattgctatgctatgccggcgacgagcacagcctctctcgcacgtatagagtccctcgtttgtgacgtctgcgagaacctcatcggttcacctcaatcccgttttggggactagcgcgactgacttgggggtgatgctcctggtcttataaagccgagtgcgaagattgcagacatgggactagagtcaaggacgagtgtgaaggtcgagtcttgtcgaagtagctcgagcctctcggagagaacgactatgccggtttcaacaagctataaagaccggctctagctcgctcggaatggacgaccatgcatgggtatatgggtatgtgggacacggacgggtataaggggacgcataaggtcccgtcaggcgcaaacgatactttaagaaaagaaagagccccccatgtcctgcgtgtgcgagctccttacaccggggcatcgatcacgaggtccatctgcgaatccaatcgtggtcggtcacctacacaatctcggcagacgatctcgttcggacgactcacaaaggtattataatcgatggtcagcttgccctcgttcctagcgtctcttcgtcgaaaggcctctgtgaaatgtttgacggtgacacaagccatcaagaatcggtcaaacgtgatccctcggggcacggaacctccgctatcttttggtggggctgtggtatgcacgaatcgcccggttgagtgaccttcgaagtgatggtcgcaaattcgtgacgagggcgacgctcaccgaatcgtttttctagttttctgacgaggtccctgggcagcgggtacccgaagctctgtaaagcctgatccaactcgctcctgtcgatcgttcccgaattatccctgcggccacgcatgccaatcagtctcccttgcggcgtagtgcgggccgcccgcccagaggacgtacctatcgaatcgcaaaaagatcttgtgccaatctttgatatacgcccagagtccctcgaattcgctgaaactgttcgatccggacgagcaggatcagtgtgtgagatcgactaggcaagtatgaacggacagtcctcacctgataaacccacttcgatcgctatcaaagatgcctgtatcgtcgagacgccaagcgggcggtcagccatcgtaccccgaatgtgcatcgtcgcgtcaccgcgcttgactcactcatgagctgggtttcagacggcagttcaacaggacgacaatgatagggcggcatcgacattagccacccggtgaccactctgagaagaccccatacatatgcgatactgaccatcttgacgcaatcctccctcggggtgatcctccatctagaatccctggacaagagctccatgacttctttattccctagctggcccgtccttctcaggtccatcgatgagaacctatccatgcagcccgatgagaagcagacagacgagagggtgtacgagacgtcgatcaaggtcagtggggatgtacttgatcgcgtaacatcaccgatgtggatgtcctgaaccgtgcgaggcggctcggatcgtcatgggagactcacatttcccacaactcttgccccgtcgcgctatccttggaatcgctcctcctcggtccttgccccgaaggtctcgtcgacagttgattcgggttgaccaccgtggggaccgctcctcctggtcccatccccacgcccatgcctgccgccgaggcagggctggtagcctgttgataaaaccctggagagcccgctgccgaggccgtggcggacaactgtgccggggatggggcgtagggggagacgttcgggtaggcgttatgttgcgagtgctgcgggagggtggtcgggttcgccggggaggacgagtaagggtaagccgacggactcgctgtggacgtcgaaggggcgggtgaacgggcgttccgttcgaccaaggggtaaggacctgtcggctgggatgatccctgttgatggctggattgagcggtcgtcggacgttgttgctgctggtagacttgttgggggtacggttgagagtaacctggctgtctcgatgaagtctggggcgacccgtaggcttgatgcgcagcgatctgtgcttgatgctgctgttgttgatgtggttgttgctgctgctgctgttgatgtgggtactgatgctgctgttgatgttgaggaggaaacgccggcgtcgcattattcgcaggtccatacctccccgtcctcgcatcgtacgctccggcgcccatataggcatccctcgccccctctctcaacccgtacccgcctccaccgctccctcccccgggactctgcatcggtgcagatgcagatgcaggtgcaggtgcaggtccagatccaggtccaatggggtgcccgtgcgggttcctccagtctccttgtacggtgttgtttccctggacaggccgaggatgaggatgtcccggtgcaggcgactgcggggaaggggccgccggtggagctctcctcgttgggatcttgagcgtcggggctgtaggtgtgctcttgtcgttgagtgcgtggttggcgatcgcgaacggggagtccgagtcgagtgcggtgggtcgtgagagtccgccgtacatggtgcgtgagatgtgggggaaggggagggatggaagacggttgtatttaggatcaagacgctttctctctctctgtatgtgggaggaaggatccgaatcgaatgatctacctaccgatgaaagctgtatgatgtcgatgtcgatgtcgacgttgatgttgatgttgatgttggtgttggtccagctagaggtggctggaaaccggggttccccacaaaaacacactgacaaaggtcaaaaagtggtagacaactcgaaccctgacagaatcgatagatagaatagacttcattcattcaatacagatcatgcatcatctcatgagggtcactctgtagtagcaatgtcatccctagtaagtcccacttctcaatgacgatgaaatatcaccggcatcgcctgtaatcccgatcaaaaccgtgtcgaccgttccccgaggtcaatcccgcgagcaaagcgagaccgactcgattcgatcgatacaaaggggaatttgaccgcagctgctcgatctcgttcgtacgaccaggctcgtctgaatctccttagtacttcagtaggatcttggagtcggatcgtcgtaccctgtgtcgtcttgtctaaagtctcgccgtaagagttttcgccatcggtcgaccgtcgaccgacagtctagccacctcgactagagaatacgagtacaagccaagcgcgataagtgggtggcaaaaggcaccacataggtcgtagctaacattatcatcaaaagaaacgctcgccgtagaattcccaatcgcgtccattgtagcactgcgcaagactgccgaatcagctgctgtttataagtaaatgaggaggatcgtgcgcttggtctacaccgcccgagcttcttcgagggtggactgatcgagtggagaatcccgcgcatgtcgttgcatcttctcgactgaaccttaccttacgaccgagactagactcacgctagaccccaatatcccgcatatcactacctatgtggccatcactcgccgtcagtctcccaagtcgtcaagggcttgactctcggacatggaaatgcgtgtactaggggtccccgagcagatccacgaagacggggggactacaaatggttctctcattgcgtattatcgctcttcgaggaccagtccgccgtgtacgccggtaccggacagagacgcttcggaccccgagcatctgatcgcatcctgatgcacctcctgtgtaagcgactcgggtctgctagacggtcagctcccccgcctcgtcgtgccaaccgttctgatcgagaggatcatcatgtgcacacacccccgcacatcgaaatgcgcagggctagatcgacggggacgcggtcgatgggctttcggaaaagggcggtttgcctgacgacgcgtcttttcttgtcttgcgcctggatcgtgaagcgtgaatattccaaggcagcgatcttggctgcctcagctaatgtcgagcagttgacaagacgagattggcagcgggtaccacctccatatcattatatggggtgcaagcaagagccagtatgctgtcaaaccctcgccctcgacccgcctcctgctcaccgtgcacatccaccacttgaccatccgatcatacctggcgggtcaacgacgcagacgtccacctcgaatcgcgatagatacctcttctcatctgattcgatcatccccatacaaacgacgccaccctcgatccacttgcgggacgcgagccgactacaacaacgctttcggtcgatttcttttttacacttgcacacttgctgacccggcccgtgatgagggaatgggttcaaagcccgaggtcgagtcgggtcagcgagggaagagtctgatctccttctacttcttgctagggtcggaagtgtacctgaggtaaggctatggaatgggagagacgagcgggtacgcaagtcagtcgtccgtcatcccgcatgacgctgtttataagtctccactcaccttgaccgacttgtaacccgggaacaactgatcggcttcctccttcttgacgctgttggcgacgatgacgtcctggccgggaacccaatcgaccggggtggcgaccttgtacttggcgctgacctgcaacgaatcgatgaccctcaagagctcgtcgacgttccttcccgtcgaggccgggtaggagatgatgagcctgatgacctttttggggtcgatgatgaagacgcttcggacggtgagggggagaccgagggcgtcgacgttggtagagtcgagagcgtcgagcatgtcgtaggtggtggcgaccttgcgctccttgtccccgatgatggggaactacgaggtcgaccgggagacaagagcgaggggatgtcgtcgatcagaacgtcatccccttgtgacatgctctctcggagtggtagccggtcagactcaccgacaaggaagaacccgagatctcatcgacgtccttgatccactcgtggtggctagcgacatcgttggcagacaggccgaggagcttgactcctcgctatcgagacgtagatacgggtcatcatgagacggatcagctggggcgttcgattgagatgtggtccggatgagatgctgacctgcttgaattcttcgtgacgcttggccaatccaccgagctcggtagtgcagacagctgttgccgttggaagatagagggagtaattgtcagcaacgtaatctactgtcttgatcacagtgcgtggcgagcttacgggtaaagtcgtcctaagaaggcgaatggcagatacagacagacccacccgatgagcctcttcgttctcatcgggaaatcgccgcttacggtactcacggggtgtgagaacaacatgacccaatcatcgccggcccacttgtggaactataatccatgtgcaaggaaaaggttgaaggtataagtgccgatgaaccggggtcgatcgaggcgggaaactgacctcgatgtcaccggtcgaggtctcggccttgaagtcgggagcgatggatccgagtcggagattgaccattctgaagagatgtatgtgaggtttctgactcgtagtactgcgaaggatgtagatgacgaggcgagaagtagatggatggggggggcagagagatatacttggtgttgcttgctacttgtatcgaccagcagttgattgccagctcagacccgaactgacaatcacgccatcggacgacggaagcaaatactgttcggatccaaatggtctccatcgtcggatgtaaatctgattctgattccggacccatcgcttggcatcaacctaacccgttatggcaatctgaaacattcgttgatacaagagacaacatcgaaacggcttcattctataagaaatgggttgcccgtcgaggagaacagttcgaagccttaaaagacccatgaatgagataaagaaaccagttatatcgccacggtcctgaagatctcccgagaacgtcgaggttttttttttcaggcgagtaaggacaggctcgtcatccgtagttgagtgcccagcctcggtctctatcgtcgtcgtaacgttggtcacctttgcgagacactactgttgcgtagtagattccgtcttgcatgtgctactcggtctcgggcggaagacggccatactatcagctcactaccaaacgcgagcaaggccttcctcatgaacgttacctacatcctccggtcaagacagtgcctcctcgaatataatcctcctgaagcgccaacatacgagtatcacaacccttcgattctcaagactgcgtaatcgtctgagagtgtcttacactagacctgttcgacgaggagcacgggatgaggatgacgtctcgaccctcacgtcctcacggctcgagggcgctcacgttcgagtcaagaccctttgaggatagcggtcgacctgacggcatactaataaccgtcactatcacgattctcagtaaatatcagtctcaggagatgttcgcttcttgaccatcaaggtatttctctatgatgatcgtagtaagacttcccaggcttttgatcgagatgcgatctgggagcgcttgactaatgcctttttcgccgtatcgcaagtacaagatccctcgcagtcatacccagagcgagggaatctctggaacctgaacctgacccggatcacgacgagaacgcaccggaggtcttcttcattggtcaagaaggcgcggggaaaggaggggggttagccttacactcggcctttgaatgggcgtttgtgctccactccatcgagtcatcgagagaacacgatcattcttgctcgtcatcggagaccatgcgcagtgcgtcgccagcaggatcccgctcgctgcgaatgaagacgttgtcgctctctccaaagtcgcggtagcagtccggacggtgctttttcgaggacgaccggcaggttgataaaagacggccatgtaaaagatgtgtggttcattcaccttcttgcattctcggtataatcgtctcttgatcgcactccacgatttcgttgtgtataccatctataaaaacgaaatctttactacacacttaaccctcatcaactgccctcaaggccttgacgacctcttccctcctctctctccacgcttccgtctccccctgtcttactctatcctccctggtagccgtccctcctagttcggcaccggtcgacgggtccgggaggcacgagagggtatgcgcgaggtaattggcgatcaagagggtggtatacgattccgctctcaagtagagtttcttcaacgtccctgtataaggtaggcaggtatacacatccgcgttggtatcgcggggtcgtcgaatcagtctcggtatgtcttggacctccttcccactgcctcgtgctggtgggatactgacctgaacacccgatgacacggggtacgacccttattccgtccagttcgttcatgaaagacagtcctccccaggctattcggaaatgatcccttgcgacgcgcatgatgcacaacgaggtcgtctgtgaaaagtatttcactgtgaacggtccagaggcatcagagataagcgaccgggagacaagtggagaggactcggaggaggacgagctcggacttgcctgacaagctgttccctactttgccccacccggaatccccaaagacgtcgacgatgcttcgtttgagagcgtgatagatctgcttctcggggatcatcttgcccggtgtcatccccatgaccacctcctttcccttgaccgcttggggtgacgagctcgttgctaaccgttgagcggccggggtcatgaagatcggttgattcggggctagaaaggggatggtcgtgctcgtagggtatctcggactgtcgtcattgtcttcctcctcgtcatcctcttccatagggacctgtccatcaggtcctcctgtcagttcgaaaacgggcagatccctgggttcctggagtttagagctggatgggggacagtgttgatcgggttgaaagaattcgaccaggagccaacgattctgcgagaggaaaggaagggcggtcagaacgagcccctagttccagtcggatctgtcggtaaattttaccttgaatcggaccatctcttaacaatgactacgaggtcgcttatcgaagtccaaacgacttctatggtctatatggaggcgaatcatatggccgggggtttagatagatagagtagagctcttggacgacttttacttgttcaaacaacttttatgtgaacgcggactttcggcgttgagcgagaattcgagcaagagacacaagtagcatcatcatcatcaactgccaacttaccaccaagactactactactgccacttacgatgcagcctcgcacgctcagaatcgcagggctgacctagttacatagctttcgtacaagccgagctgaccatggtgaccttcgtgtcgttggcggcgttgaccatgctagggtcgctcgtcatggcgactcaaatgccatggaccacgagggatcccattttgtatgtcgaggaatgggaggtttgtctgtgccagagactgcctatctagctgtcgtcatgaaaggtattcatgtctccatttgcctaggctatcggaccgttccctctggggatgcgggaacatcccttcatcgaatcaccagcatacgttgcgttcgatcactcacgatctcacgatcgacaattcatcgacatacgattcaacacgaccatctttcccagctacctctgtccgtcagggatcgctctgtggaagagcttctatcacaccccgggatatacctctgcgaagatctcttatgaagaactggactggcgaggactacgccgagacaagggttgggaagggacgcaattccaatctctcctccgagggaatttcaccatccctaccggacgcaacaacatagacgtcgacgtcgaggtcgagatccaactcctgcgtggtcaagagtttgcaatattcgctcgcgaggaacgggatgccatccctcatcttgccgggctgggcgaatggcattccgggaacatatacggtctggcacctccctcccccttgatctcggccggggagtggcatcttcctcatcggatgaccttgagagttggggtagagtacgtcgtttttatcaaagctatctacgaagtcagactattcggggatcccgggccccagggacctgtgatcgactttgacttccaaatccgaatcaaacgctctgctttactgggggatggttctggcgagagtacggctgttgaagtcctgcacgggctgaatctgttgggtgacgtcctggatggctggatcctcggaagccacatcgggattggtctgcaaggtgctttcacgaatcaagaactctcgatcaccgaggccaaggtgatcgggaaaggctcggaatgcttgtctatcgtgcaacctcatcgacggttccggctggtcgacagacaggcccggctgttcgttttcgagatcactcaagctggaactctggacgcagatcgcctgtccatctcgattacctacgagatccagggccataaaggcgagagagaaatcgaagtaactctacctctggtccatcatacgtggacgcagcgaaacgagaccaccgcctggagattcacacacacctacccgagttcgaccatcacatacggtatgctcctacccccgaccggctcggataatactctatcgacggataaagacgtcacgatcctcgctctgcacggagcaggcgtacaagcgcattcaagaatgtggacggacgagatccctcgtcgcgaaaacggatgggcggtggtcgtcacgggcgggaacgaatggggtatggactggcatggcatcagtatggaaggtagtcggaccggtttgaaggaggctcggaagcttgttgcgggtctcgcccagcggctcgggttaggttcagaccaatggcgtatggccgaccagaccgtgtgagtatgcggtccaaatgatgtcgtttctgcagagttaacatgagatgacggcatcgattcgtagagtcttgggccatagcaatggtggtcaaggggcaaatcacttggcctcgcactatcctgacgaattcatcggctgtgagctggtctgcgcttaggaccgattgggaccgatattgatccaagaacttccgatgaccagtggtacaagcagccggctatctcaaaattcaagattacgtatcctacaattcatggcaagtgccgtgtcatccctggtcgttaggtttgatccgcttctaatcgcgcttgtttcctgattgacataggacttcgagacatttcgccgatccgatgttgatcagtattctggatgccgcactcaccccttgcaacaatccggtttacgcctccaatctcgtcggcttgcccgtgctgacgttacacgggaacgaggacgacaatgtaccgctgtggcactcccgcgctgtgagagaattgatgctaggatgggacgaggacccggaaatgttcaggtacctccttctctacctttgcccgttaaatttgacctgaccctcagctatgcccgtcggtagcatggacgaagtcaacggcgagaagcatttctgggacggtgttttgaaacgcgaaagcgtgaccaactttttggccaatatgtcccgtcgaacgaattctccgctcagcaaggggtttaccctcacaacagcgaacccggcagagacgggttccaaatcaggaatcaagattgtcgaggtggacgtaccgggaaggttagtctcgggcactttggcaggaccacgtgctaaactctgtatcgccagaattgcaagagtggttgttctgcctggctttgcctatggtgctggccctcttcgtctaatcacccgcaatgttcgccgaatgagtctggatctatcagactgtggcgtagaaggaagcgaggtcacggtggacggcgcgacgtttacggaatccgtcataggtgaaactttacagcttgtcaggacagaatcgaaatgggaggcaagttcctccccgaacaataatcctgagattgtatggcgcgctgatcatgtagtcttgtcttcctcaccagcgagatgcaaccaagccctcttcaagagcttcgggaccaatgtcgaggatactctcttcatctggaccgctctgcgttgtctatggtggcgaatcaggcattgtcgacaaccctcataaggccctagcattgcgactcgcgcatgatctgcatttatatcaaggccttgacgtggaagtccttcatcatcgagtcgctctgcaagcggctcacgaagcgactctcgggaatggtaatatcgtgactgttggccatcccgaaaccaatttatacacccgttggctgttggagcggctacccagttcaagtatgtcaaagacccttccggaaatactggagcgaccacttaatttaagatcatgcagtatcctggtcatcgccatcgaccatgaaactagacagtttggtcatcgaagagcccggtactggtaagactacttcagtaacagccgcttgatccatgcttgggcgctgatgcgctcgatcacgtaggtatgatcgcgctattgcctcgcccagtcgatgctggtggccttgtttgtatcgttgctggaactgatgttcagggcgtaaggcgggctagtaaattactaagcccccgaacaggtatccctgtaagccacttgctgttacattacgcttcagtcaagacttatctctttcgacgcaggtacctgattgggtcgccatcggcccgaccgctgaatacagcggtgctggtggaatcatcggtgttgggtgagtcataccttctgagggacgatctcagtccatgcgaattgatctggccgatcctgctgtagattctggagtcgggaatgcaaatggtctcccataatgtcatatctctcgtaaacggattctatcgctaggaatccgaaagtttaatgtccatggcgactacatctgctcgtcgaaattgtccgtgccgtaagtccgtattctcatgtcaagtctcatcaaagttccattgtacgaaggcacgtctgcccacaaacaaaaacatccattggtcgaacgaacattatgaacatagtgacaacagacatttcgactcaccttgcgctgtacgaagagcgagacaaagtcatctacccagactttaaatagttgaaatatgccgaaacaatccgagcttttgatcgtgagatctcgcgtgatttccgacgtgaaccacgctgttacgaagatgatcctgatgcgaatatcgcaaagtccataattatccacttgcaaccacagcgagactactcacttattggctcctacggatcggccttgtatgccatcctcgagcagctgacatatcatatcttgaacccaattgctcatctcttcgatgctgatctcgtcgatctgtgattgaccctggttgtcgcaggcctgctgaaggatgtcttcaaatgggctcatagccatctcccgcatgaccgcctcgtccaccatgagaacgagtcttagcaagcacgagtaagtgttctaaagactggtttgtgaacgttgatatcattgactaactttgtctgattcagaatcgaggaccaattcaaggatttccatgccgataggacacgcaaaaaaaggttctgacggcaaaagagatctttgatcacgtccgaagtccgacgtagatcgcaatatcgcactaaaaattacaccataaggggtcagcatactgatttactgtcggctggctgtaggactgacttaaaaggtgaccaacgatcttggccatcttcgtccggcttgctacgaatgatccaaaagaatcacggttgaagccttttgtagagacatccattagggtttccaatcctgctccgagctccgaaagctgatgaacaatgatatcgggtaagggttctgccagatgactgatcaggaagcccaaaatctcctgtttgtgttggaatggtactcagacgatgtactgcagagttccgagcccttcattcacgtatttacctcccagaacagcgactcgcatcggttcatcaactccctgacctggtgtttacgaatttcctccttgaggttgtctgccagcgatccccggaaaagcaaaatctatggatcgacatactggttcaaggtcgagatacgaacggtctgtatcagttcgacgtacgatatgctgtactttgtttgtgtcccaggtttcgaaagcctccaacactgttctttaagcgattgaactcagtagacggagaattgcgcatggaattggtatcacgcacgcatattgaagtgcatcctcaagctctcccataacatcgtagcgacatcgtgagccatgtacgatgcaaactctgctatctccgggtacccttcgagcgattcgacacgattcgcagcagccatgtgtgccagatcgccttctgacatgccggcgagctggtccctcgaagtcgtctgagctggaccgtcggttgatccatcatcggccaatctggacgtatggattgaccggaaattagctcgaggcaaacctgttttatggtcatatagcctcacgtctgcatcatctcgagcgaagagcgatcggccaggccagattggggcatctggtagagcaacccgttggcgttgccgttttgctcactgaagtcgttcagtgcttcgcattgcgatgaggtgactggctggatcccgcagtctgtgatacaagattcagtctcgacggcgcgtcgatatcaaagcaaatcagcttacagtgataccggctcatccgtctcgaccctaatctacgcagattacttttcggaaacaccctcaagatgagcgatcccacaagggctttgcgtacaggctgcgcatatcgcgtttagttcgcgcgttttttgagctgagacgaatatatgctagcaggctcacaagaaatccataggatctgcatgcgtcttcgtatccttcatatacgccttgctttgctactgtacagtcaggcgagggcatatagctcgctcgcagcctgaaacaacatgatgagcggaagcaaaatcgcctgttaaaagatgtttcgcggcttaccaagctcgagtccacttgatcttgaccagttccgcctgcttgttgttcggcgctgccttgacgtgatcagccaagagaagcaacttctgatgacagatgacctctctttcttcaagcgtcagcaaagtgccttggggatcatgtgtcggtatgtcaacatcaaagtccgcatcgagggtcgaggctggaatgtcctcgcagccttcctgatcggcatctagctcatcgccgagtcgtctgcgcttaggccctgacactatgtgccttttgccaccgtgcctatgtcgcctactgctcgattcccgttgctcgtctaccagcccggggccgagcttgaagacttgagagtctgccaggatcgggtgctcggtatttccgatgggttgtgtagtgacgaatttgcccgaaacggtttcggatggtcttcgagagtacggcttctgagtgtaccgcctctccagcgctcctcccgtcgaaaccgagctggatctgctgtgacacagacacccttgtcaagaatgtcaggcaaacgttaaggcatccagccgctcacctcgagcgaacgtctaatacgttcagagcatttgcgagcgttccagccggagtgatcgggaaagcactactcaaatcttggctggtaaaagatgccgaggctgggagcgtctctgccgtctgaggctctgtccagattgagctctcgggcggatagaaatgattttgcccatgaaacaacgacctataattgcgccttgatcttagtgaattaacatgagccatgaagagcctctgactgactgatcagatccagccaggctgaggttgttatactgcgggaacatcgcttgtgcctccactactgggtaagccgacatcgatccgaaccccgcactcgtatcgttcagcaaaccataagtggttccggcggcgattggggtaggatggttcaggatcgggcctgctgatcgagcaccagagtttccgacgaccgggatgttcaagctcaacctaggctgaggttctcgatgaccttgatttctgaacaacgtctgaccgaggttcggcatggtgtccgatccgtgcccgacctctccacgagactgtacgggtgcggccggaacggaagacggggtagcgttgaagcggaaagggttcgcttggtaaagctgattttgatcgttcgggttttgggtctgagggtaaatatatgtggcagatgttccgacgttgccggtagtcatcgttggtataccaccctgtttgaaactgccgagagacgcgtgatgaacctggccgggtaggataccccagggtgagtccgcttgtcctgcactattgctcctcttcccgagatcccaactcgcgctcggtttgctggtcaagaggagttttggagtgcttgagctggtcctgagagcaaaaggcttggttgtcgtatcctcagtcataccgagctgaggtgtagaggaaatcctctgaacggtcgatgtgttcgtatgcctttcaatcctctccacagcaggccggctatcggctggggaaatgtacccttgtcgactccatgatgagctcgacatggatcgattaggagattggtcttgatcctggtcgtctctcaataactccatctgttcccccgaatcagattccgccgggtgtccgtggtagctgtaaggaccgcccattccgtctcctccggtgaaaggcggggtgacggccgaaatgcagtctcctgtaccccaaaagtcgttcgcttgcatgtgatgatcgtgcaaggtcgcatttggctgttgttcttcggacgcgtggatgaatgtgggaaaaggagcagtcggagtgatcggatcggtatccttgtagagttgaaggtacgctataggaagtgaatagcggtcgctcagacattccatgccgtctcggagattccctcgcaactcacctcccgtaaacgtcattggggcgtcaacacacgcagggtgctggtccatggtctcgtcattcaaggtaaaaggctgcgtcatgacaggtggcgatggattctctctgacttcctcaggtggctgacccgcgttcatgatggatgtctggaggaatttcgaactttgctaggagacaggttgcttgatgacgccagccttccgtggtaatagtagtctgtgtatctaatgatcagcgaggtcaactcgacaagatcgtcatcttggtctcgattgtgttgtatgaaaagggcgaggccgatccagtcgatgtagaaaaccccccggacgttcgtgttgcacgtgccctgttgtcgccgtcttgagcgtctcacttgcgggcacactacaacaatcagaatgaattagccgatagtctatgttcaagtcgctgttcggcgatccctgtgggaaaatgacatacctccgctatccactgacgttctagtgtcccgcacgtacgtcttctaaaatggctccgggcaatcttcagcaccgaccgctccgatgcgatgaaccagcatgtcaaggtcatcgtcgcctcgcatgtcgtcttcttcgcttttgaacgatcgtggaatcagaaccctcgatgccatcacatcaaaagaccagaacgatctcgattttctgatcccaatctcgatcctgccgttccgtagctctcgttctcctttaccggtcctttcccctcaggatccaccttctatcagtggccaaagggacccggtaaaactccggcccgtttatcccgacgtgttcgcgtgcgttcctttgttcttttgccaagatctgaaacaccatcaccgaaacgttcacactctccgaagagtactcgtactcgccgtttgcgccgacgtgggatcgagttgtgctcggtcagggatcgcaaaaacccctcgctgcctggatcactcgtcgattttccctgatcctgctctcctcgccaagattccctgactccttccaagcacgccccccccccctgccttaacagaggagacgacgaggatcaatcaaaaaggagggttcatccgataaggtttacgcggcacgcgcccccggatagtcccgttggctccgcccgtgcgtggatcgtctcacgctttgatcagattagatcgtccatcacgactgagcttccccttttcaacctgctgtcgccactaaaccttcttttgtacgggtctcgtggcgattggcgctctacttggcgaggaaccggtgacccttccttttcgcaagatccacccacattgagtccttgataacgtttcgcccgtccggatcctaaggaaacgtcgcgtcatcgtgtttcaacccatttcaggcatcttcgacaagtcggcaaagggttcggcgaaactgtctcgtggcatgaggtaggtagattcgtgatacgggcccgagacctgcgtcatgattgattcgtcatcgtattcataatttgagggttctcgacccttcgatcgttgtcagatataagctaaaaattgatcggcctcatcgtacagctgtctccagtttctcaactgtacgacctgctgaggggcatccaacaattcccatacgaaacaaatataccggttcagcgtcgaccagtccatccgcccataaggttcgagcatctccactatcctttcgaccgtcttcctatcttcgcctttcgccatgtatgcagcgaagcagaaaggcagacaaaggctgttgacgggacacgtccttcagatcggaccccgcggacagcataagcccgaaaatcactgcaactcactgtgtgaccattccttgaccgagagcttcgatgactgtctcgaaaatgagattgacaccctggtagactttggagacgtttgatttggtgttttgcgcgtcgatagagagccagatcattacgcaattcttccataaaattcttcccgctgcgatctacggaccagggaagaacgtcagacgtgagtcctctcataaaagtccacactaggaacacactcaccctggcaggatagggcctggatttcgtctccaacccaatttcctctgtttctttcaacaacttggcacaatcgctacgatatgtctcccatttatcttctacttcttgatcagagtaccttgctagtcttgccgaagagacgcctgcctttctcatggcagcatgtcgaccgattgccgtcgtcgtcagcacccttccgaggaaatcgatcatcggcttgtcaagcccgaagacggtctcgacgtgctccgaaagcgagcggggagcagttgggcctgtcaagcgcgaaaggttcaacaaccgataaataccttgtcactagaggcagacgtactgtagggcgctttccaccaggcggcatgtggctccagtatgagtggcgcatcgatagtgtaccacgatgctagaagaggtcgaccgctcttaagccatgcgacgtcgaggactgcgttcatctgcaccactcaccaaagacgtctacgcaagccatctgctccatcaaaaacctcctgatcatcgtatgagacgagcgtaggaagctgtcggcgccacctagcttattgatgaggtccgcagcgtattcgagagagtacatccagtttcgacaggcagctatccgctgaggtattcgatacgagtggatcagtagacacccggtgagcacgagaaggtaccacccacgtcacggtgcgacagcgcgagacatgtcgctagcgcgaggtcatcggctgacattccaaacggtcccatttttgcgccaactagagagtcgagtaaagttttggcctcggctcggaggtcctcgctaagtttgacaatcggattgaggtggacctgctctctcgtcataccggacgcgatcgtgattcgatatcccagatcgtacgccgacaatgacaggagagcctggcgaaatgcatcttgcgcggggcacatttcaggaggcacgccgagtgcgagtttggcgaaatgtcgactccaaggattgagatcttttcgattgctcatcgcaataagcgtacttgaagtctcgttgatgaaatgtcgatactgcgatggtattgaagagtcaataatgatgaatcccgtatttttgctagcgaagcaagttgcaaggaccgagcactgacaataattcggtcccggtcgaccggaaaatatatactcaagggatcaatttccttgacaatggcgacctcacctctgggttgatggggcatcagaggtaatgtcatgttgccctggcttctcggactcagtccgaacagctccgtgaatgccggcgggaacgaattgtggggtacggccgggtgaggaagaacggcggtactgttgatcctgctctcgatcacgatcggacgcatgcggccgtcgcgatccctctcccatcgaccctgaacgacctggtcgtcccgctctttagtgataacgctcggataaggtatgaccagtgcccggcttgttcgttgggccagcttggctccttgagggtcatcatcgagagatgaatcttgtggaagaccgatatatctcgaggcgtactgctcttgcaagttcagctcgacaccaaagtctgtcgaaagtgggacttcacgtgggccatcaacctttacaaaaggtagcagtgacgcttgatttcgtcgctcgaccattcgatttctcagcctttcgctcggcgtgaccttatctccctctgcccttgtaggaatccccggcaaggggcccacctgcgtcctaaagttggtcgtcaggtccgtcccgctcgttcgctgcgccggtagccgggaaggaaattgtacccactcgatcggagtcctctccaatcctggtggctcgatgtatgacggcagtacgccacccaggaaatgattgctaggtagtttggcggcgggcattccggatacgtagagatcgtctgtgcttcgatcgggcaccgcttctggctgtagaggtcccatcggaaagtaggttgctgtgtcgtccggcggggtgagaaatgtcgaagacgtcgaagccgaagtcggggcagagtgagggtatgtccattccccgggcaacagtccagggttcaccggcagaaaccctgggggctgaggaatcggttcgtatgatggcatcgccatgttcgttcggggtggcaatcccatcatcggggtatgataggaaggttcaggttggagaagaactgtcgtgtcgtcgttgttgataggaatgaagtcggccgagtgccctttgctatgacgcaaagcgggtcgacggtccgtggccatgtttggcagcggtggatgttccacaggttctggtccggaactcaaggtgacgactggtatacttggcggcgacaaggtccggtttgacaccttgtccctctcttgcggggtgagcgtcgacctgtcaccgcgagcgctcatcgcagactcgtctggagatcgccttgttctcggctcttcactaaaaccgcactgtggtcattggctgcattagtacaccatctgacaatctcttcccgttgcgacttgaacttgctggacatttccgcttgacgcaaggtccgcacactggtcgttgctcgtcgcacttgacccgtctcgcccggcatgtagaacatcccgacgtcgaccttgaatgatgcctcctcactcttcccgaagggtgaaccggtctagcgagataagaacactgtaaccgggcatgaacgatagtatcagaacggtactggtcccgattgaacgtcctgctcgtatcgactgacgtgggtttcgcgtctgacacatctagagcaagctggtttttcctccccgcacttgaccttgctccttcgacaggtcacgcaacctccaaacgacctcgagctggcatgcgagctcaatctagcgagtactggcgtggtcaggacaggttcttacgtgaagtctcgaccaacgactctgcgctcactcggtcggttcgtcttccatccctgggagcatgggcgccttggcatcaaagtcgacggccatgggcaaatctatcgacgtcacattgttccattcgaacagttgttcctctctctcgctcgatgaataggtagacggtccagccatattcctttgcgctggagttcggctagcgggacgcccctatgttgtttgatgttgattgatgagaccgcaagcgaatccgggacgttcgcagtcgtgtcaaaacggcaagtccgtcgcaaccatgttcatgacagtatcaagaacgtcaagatgaggttggccgtcgatatagtgttgtgtcaattgtcaacgatggatggtatgatagtgatgagatgatgatgattgtcgaaaccagacgtttaatagattaaaacctcccgtcgagttagcttctccgcgctttcttgcaagcccgctcgcattaaccgttcaagcgaaaaagcgtgacttacctggagtgaatgcctatccatctttcaacagatatactacggcccagatctaacgaaaatatcaacgagccattatcgctgtatcgtcaaggtaatcctggttgatgaggtgagaatgacggtgggtggttcggtgggatggcgagagtgggagagtgatggttggctttcggtggatcgttagcgtcgaagtgatgacgccgggcggatccggatccgagattttcctcccgcgcagtagtttcccccccttttcactcctgacgggatgttcgctgagtcgttttctttacggagcagagatcaagccagacctaaagggctcaaccaaaaggtctttgtaatacaaggtgcgctagcgggccgagttgtgacgacctatgaaccggactacggccgttcgctcgaacgttccaaaagctgctatatacgtgatcacgttcccagacatacggtatcatgaacctgacctcgaggccgcccatccgctgcgtgccaaaccttccgtcgttgccctgtgaaattcaagcctgcaagtcctcccatggtcttggcaagacagccggcgtcgatcgtcgactatttgcagctaaaaagacggatgatggagccacacataaccggcaggggctgggctggaggcgtctcgaacgtaacaaggtgtggtcgcccaacggcggcggacaggagcgaggtgtctgtctccctctgcgtgaagtcgcgggaagggactaggtgttgtctctcctaatccttttaggatcctgcccttgtgctgagctgctgactgctgagaccggaacacgacacggaatctacaaacgatcaaatcccaaataaccgaaagaacaatcatgatgatcaaaaggaggggcaggaaggaccgccaggcgaaatcagcgcaggtcaaaaggaaccgaggaaccgaacgtcgacggcggccaggtgacacgccacgcggcgtggcaagggcgaatgagagcaaccgatcacgggcgcagagctagcgaaatcgacagaagtggagggtccggcaggaaacggccggaaccagatttggggctcgacttcatttattggaattttcgacgtcacctcttcggatccgagacggtttccggataagctctattcccgctgaaatatgatcacgagcagcagagcgccgaggggccgaggggatgttgagaacggtcaatctgcagagacggaattccggatcacaaggtcgaagactgtgagatctgggagcaattgcagccagcgggacttcgatctcgactcgcattgagcccatggcctgtgttctcatggcctatggcaaactgtgaatgcactgctcgtatcgacctgcgacatagagcgacatgtcatcacagtgagctcaacaacgagagctaattcagacaaagttcatctgaagagaatcgaagtagctacattaactgtagtagtagtaacaggacgcggacgaggaatacaacactctattacattttgaacgtgtctgggacttgggtatgctcacccttttttatgtgtgagcgtcagaagataactcatactagtagtgataatatggacctgccggcggccagtatcgttcggtgtggctccagtataggcggcagttcattcgtacacaatacacgcacatgcccacctttacggtgtccagtgacagaatgaatcgcttgacatcctcgtcgctctgaggagcttgttatctgtgcgcaatctgaacgacaagcggctagaggctcagacggaggtcagcatcagcggttacgacgacaacacgaacgacgtggtgtgggagcagctcctgaggctgaccgcataagctgacgcagtccgcgtggcatactaatgttagcggcggtaggtcatgaacatacgagaggaccgagcttaagaaagggatctcgacagtggaagattctcgtgtggtaagaacgcagtgactatatgttaagactcgtgacaggcttcccatcgaccggagctatcacctggaaccttcgccgcattggccagggatatcgccctgacattggagaacctcggcggtcatcctcaagctagacgcaagactgaaccggtcgtcgacgagcaagaggtggctcatgacccccgcaggactgctccgtcgagcagctgagcgatttgcagcaggggaagatcaactctgagaagggcaatggctgatgctttgcgacgatcttggctggggtaaacgaaggtcactcccaatgtctcgagtcatctttgagggaggtctggtgcaacattgcttgcaaagtgacagctgggaaagctgttcgtcccagtcctgcggtatctcgggcccgttgcacgagctatgtcagactatggcatggaatcgggatccttatgggataccaaaattgattgtcggtgcgggttgcggaaatgactccctccttgctccacgcccgctggaaggaacttttcggcactccccagcttggtcgttcgatgtcaagtgaggcacactcacagtcccaacccaacatggcaggtaggccatcctcccgtgtttcaagaggtgaccgacgcagagaatgcggatgtgcgaaatgcgaaatgttctagacccgtctgaatcggaagcagctgatctccgcacccaaacgtaatctcgaatgaacgaatgatcgatgttgacaccctctcgctttacatttcgcatcgataatgatcccaaaccccatttccttgtattcccgatttctatctcgcccgcgcattcaaggcgaaaggcgagcgacctttcgtatgttgaaacagctccatccttgtagatccatccgcaagccgagatcacgagcgagttgcgaccagacgtctacgagctctctccctcgcagtgagccttgtaagcttgttcgcttaacaaggtctcgaactcttgaggagtcgagagcttgatcttgcagagccagcctatgtatccataacacgggtagagggcgaacgggatcagtttgtacatttcgatcaaacggaagatgtctagcgttggtggaaactcaccggcaccctcgctgtccttgttcaagaggttggcacgctcgttcaacgtctcgttgatctcggtgatgaccccgctgacaggcgcgtaaatgtccgatgcggccttgacagactcgacggctccgataggatctgaggggaatggtatcgtgctttcagtactgctccatcacactttctcgagtgagaaaaggtatcgtcgactcaccctctgcggcgacctcggtgtcgacaccgggtagctcgacaaagacgacatcgcccaaagcttgctgggcgtagtcggtgataccgacggtaccgatgttggtggcatcgtccaagatgacgtattcgtggtccttggtgtatcgtttggctggacatggagacccaacgtgatgcaggaaaaaacaagccaaaggaggtgtgttgcgttttgtggataaataaggtggacgccagaggggatccgacgttcgttttgcgacgttccattggattatggtatggacagaccggtgcagagacatttaaacatcagtacgatgttgctgtgttcctggcatggaacatgacacgctgctctgacttacagctagcgaacctgacggccgagaatcgcatcgcagccagaggagccgacctgctcataggagcggccttgaaagcggtcctggcgacagcggtacggaggagagcagcgaccattttattgaaaaggtctgtagatgatcgaaaggccggacggaattgacggtgccatagggcgacgagatgtgaaaggataagacaacgtttcatcagcacctctcgttgacgacatgacgaatcggagcacgagcttatcggtgaatgggcaagaacgtacgtggcagggatgagtcgatgagctagagtccgaacgatgtaactttacaagagatatgcacttgggtccgttcgagaagaagtagtacgagtatgaacgtttccagaaaaggtcgaattgattcgctggcctggcagatcgctggccaagcaaagacgacggacatgcccatgcctgaattccaatttcctcccgcgacctggatatacgcggaagcttccaatctcaccgccaatgcggatgaggattggaaaatcaggtcgacttgtcgactggatttccagagatcaagtgggaacgagtggaaatgaactcttgtagccccgcttttgagaatacgacgtgccggttcgacatgtatggtatacgtttgagaaatgagggcgtagtcttccttagatagcacgatgatgagaacagacataggaaaggttcacatgtcgacgatgaaaaagctcggtgaaacctgggtggtcacagatggaagaaggcgatgtgacgaagcaaaagacaaagtgaagggatcccgtccgacagacaatctcttgggaactacttgtagtgtgtctgtagtgaatcgtgcaagattagcctcgcggcctcaccgattgaccacctcaaagacgcacgttgatcaaatccttgtaatgctccatgacctctttacgctgaatctttcttgcggccgtcagcatgaacccagggagcctgcagtacgacatcgaggtcagcacgagcgtttcgctgcggaagagacccccgccgactcaccactcgtcgggcgtcaagatgacgctctctagcaactcgaggttggtgaacccttgcttctttccattggcgttcaactccctcaatacggccttttcgacctccttgtctctgcacagcttgtccaagtcttccgaaccgccgccgaggttctggctcttgacaaactggggaaagttgacgtgatggatacagacgatcatggcgggttgacggtgttgcgggttggccaggatcatgccttcgcccacgaccgaggtagacttgtagacggattccagcttttcgacggcaatgtattcgcctccgctcagctaaggagtgggaacgttcgagtcagcgagcgcagagtccctccgtgaggctaattcaaacacaccttgaccaagtttttgattcggctatcgtgtggcgcgtatcgtcagcggatgcctcgaggtcactgccacggaggtcctcgactcactcgacaattgacaacgttccgtccttgttccactgcccgatatcacccgtcttgaaccagccgtcttcggtaaaggactatcatcacccgatttcgcctcagctttcctgcgttccagcttgcagagctttgtgccgctcacctccttgttcaagtctggacgcttaaagtacccgcccgtcacactcggtccacgcaggtaaatctctccctggggcgggttgttggtcgacaagtacccagcctctttggcatcgacgagctgaattacgagcggtatcatcaccatcagccaatgttattcgacatggttgatgttcgactcaccttgatctcggtcgaggggacgggacaaccggcaaccccgtactgcatccaggcaggatgaaggatgacggccatggcgacggactcggtgagcccgtatcctgcgatacacttcctcgtcagctgtcgtgtcgagcacgcctcgtagccctacctcgacacccaccttggatcagaggcacgacggcgttcgagatgaactcttgcgtactcgcgctcaggcttccaccaccggtgagggcgatcttcaaccttccacccgtctgcgccttgacggcgttgaagacgatcttgtccgtcaaccctgccaacccgggaatcttgcgattcgtggcaaactgtttgatcccgagtgccttgttgaagaggcccatcttgccagtcttttcgaccttggcgacgatgccctttcggatcaattcccagacggccggtacgccgaccatgatgctctacagcgtcacccttcgtcagtgcgggttcgctcgtcattcctcatggctgacgggtctagcaaactcaccggcttgaactcggcgatatcacccttgcagttcctcacgttggcgtccgtcaacgtcttgatcctgccgtacccgatcgggatcccggcaaagatccagctcgtctcgaccacaaactcgaggatatgggcgagtggcaaaaaggcgaggaacgtgtcctctggcgtgaggtactcgtacaacaagtgccagaccgcaccgactgtagcgcgtgaagcagcgggaacgaggacgaggatgcgatcagcgatcggctcgggacgttactttccggcctcgtcgtcgtcgaccttgtacgaacctgcagcgacaatgttcttgtgtgtcaacatgaccccctttggcgtacccgctgcaatcgaggacgacccatcggacgtcagccaccgagacgctagtttttcaaacaaaaagaagagaaaacgaccaggactcactcgacccgctcgtatacatgatgcaataagtctgatcagggtctgccttttcgcccatccagacctctcccgtctcttccctcttgcgcttgccgaccatctcgacctcttcgatcgagaccaccctcaaccccttgccctctctctgtaggctctccaacctgttcctatcctcctcgctgacctcgccatcaaagacgaccagctcgagatcggtcacctggtccaggacttgtaggaggacggggacgaggtgagagttgatgaacatggaccgacaattgggttccttgagcgcgtgtgcgaggccagagggaccgagagaatcgtaagcggtacagatggggatggccgagaaggcacaggcgtgtgcgacgagttgccatgtcaagctgtcagagtggcgcgtttcacacacacacagaggggaagagcgtacgcaggtgagccgaccgttcacgccggatagagatcgaggggatccaagcgggaaaaatacgactgacctggtctgtccgtagatgttgaaaaactcctgcccacgactccccacgcccagctctttcaaccccagaccgacgtccctgaccctatccaagagcttctggtacccgacccactcgaacccgcccaactcgtaatactcccactttttctcttgggttgtctcttcccccgtattgggatcagtcttcgggatctgtttcgtctcgaccttgatctccttgatgggtctgtgggcgagggcgggcttgttcccgtgcgtacgggcggcgtagagaaggatgtcgtggatggtgttgatcccaggagccgggtctgtaggtcattgaagttgagcttgtcagtgcttgattatggaagagggcgggataggagtacaggggatcggcagggcctggatcagggggagatggatatggatgcccgcaagcgagtcgatcacttcctcttcttttctcttcttgaaagagtcgccccggtctttgtctcgatttgagcaattttcatcgcatcgcaggataggttgatatcctcctgccgacgatggactcagtctcatcaccctgattactgcgcatctgaatcaccgcgcactcgtcgatccactttggctgtgcgtacccctccctcccacacgcacatcccttgtcaagagggaaccgggccgacagctagactcactcgttaccaactccttgaccgcataactcctcctcgctctggtctctccttggggtttaggtgatccggcatcgacttcccatgaagccgcctgacctggtttcctcggggccatgcttgtgaatgatgacgagtgtgggtgatgagtgggtgatccgtaaaggttctagttgctgtgtgtctagagggtgttggattataacaagtcgatggaacagtcaagaccgacgtcgtcgactgatgctgatgctgatgatggtgatggaggtaggaggtctgacctgatcaaatgacctgctgcagtttctgaaaatggtcttggctgaattacaatcctcactcgagatgcgcataggatgaggtgggtggatactcttggtacgtgagatgatgttgtttgagcgtagatccctcgtcgaccaacgaccttactctcatacatcgtactcacactcctttatcctctactcgcaaaacaaaccatcctcgcacacatgtaacaaaaggcatctacgaactcgcttcctataccaaagtcctttcacggtcgatccggatcgaaagaacctacgacatgcgcatccttgtcaaatccatcgaccatcgatttggacgcggaaccggccgccgagccgaaccgaggcggggcgcgcagctcttgacctttcgaatgaaacgggaggagggtgccgccgccgtcgccgtctcatctggcttggggtcacgccgactttcaactcgaacttgtcattagagtacacccatctgatctttcgttactagggtttcatatacaactggaatacaaatgatgcgatgccaggagaaaaaggtccacccgccttgacggtctcatggtcccgtttgaggataagcctctcccatcttccttcccaagaccttttcgatactctgtcccaagttggagaccgggcctttgagcactggatcaaggaaccaatcctgatcgtcatcgacaattcaaccgaatcagcgtttgaactttcggtatcgattggatgtaatcaggggggccgggctggcggggactactgacttttgagatataattcctgatcccgtcggggaggacgacgacgacgttcttcccttccctctgagccaattctcgacctactggggtctccttgaggaatttaaacaatcctgccaatgccgaacctgatgatccgccgatgagcagcgattccgtttgcctatcacattcaacgtcgagggacgggagaggggtcgatggattcccgttagcacttgaaggttgccgatcatcggtccccatcggatgacgacgacgttcagttgcggaggaggaccggacgagactcacatgacggtgcggaccatatggtacgcctcttcatccgaggtcttgatccacctgtcgatgcacctatccgatgggtccaacacttcggggaaaaagtcatacctgacccgaccgacccatcccatgccgaacgatcgtttgagcgagcatccaactgctttctcaagagagagagagactgaactcacccgataccctcgatgacatattgtccgacctgcccaccgccgaggatacttcctacagggtccacaccgacgacgatcccttcacccctctccaccttggctctcaggacttcttccgcccgcctctccttggtgctggcgttcgcttcggcaagtccatcgctcgtgaccccgacggagatctccaccacctccccctctgaccctgacatccctcccccatcctcatccacgtccgcctcgtgatccatcttgagcttgacctctcgcctctcatcttcatactctctcacctccttcctgacctccctcgctgcctctttctctggtagaggatacctccccgagaaggcatccctcaaggcgcgggacaggcctgtgatcgtccctcctgttcctgcaccggcgacgagcgcgtggatctggtccgaggggagggaagaggtacgcaaggcgtgctaacatgcgtgtaatgtatgtatcgagaaagcgaggggggatgggatgggatgggatgagatgagatagatcgtgatagagggggggggggacgtgcagaggagcgaatcgaaggggcgattcagtcggtatactcggtttcgggtaggtacaaggaggatgaagatggactgacctggatctccccgaaagtgttgtaataatgtgcgagaggattctggatgttgttatactggtccaagatgatgccacctgggatctctttggctagtttctgtgcaatctctgttccccgtcccgcgacaatgagagtcagccatgcgaacaaagtgggttgaattgaccgacagtgggcattgttatagagttggttgctcacgtatatgactatcctcgtcctcccatccggcttcggtagggttcctcacgacctcggctcccaggctcctcaataccgcttccttctccttagacatcttgctaggcaaggtgatgatacacctgtaccccttcaaccctgccatcaaagccaagccgatccccgtgtttcccgaggtaggctcgatgatgaccgacccggaatggaggagaccctcgcgttcggccgtctcgatcattcgtttcgctatccggtctttgatggatcctccggccgagaagaactcgaccttggccactgtgcagggtcgagccaagtcggatcagtacgagtaatggaccgtgctgattccctcggtcgggggctcactcacgaatgttacatcggataccttgagattgtgctaatcgtcgaagattgatcaagggggtgtggcctacggcatcggcggcggaatcgagcacgcctgtccagtggtgtgtggtgttcatcgccatgtttacttgctctggccgatggtagcgtgtcagtgttattacgctaccaggatgatgtgtttgtgttacaggcagatttatttcgatcgagtctcgcatttgccctttatgtgacccccccagccaccccaccacattgtgtatgtctctgtttgaatcagctgatgtcgttcggatttcacggtttcatcagccaaaaggggggcgagagcagcgagtcggagacgaccgaaagtgacgacaccatgacgtaatgacgtaatgaccgagggcttcatcacgtgatccacttgacttcggatagtccgaactcgcggaaatcatgtcgtgaaacaggccacagtcgagtagccagtggccggtggcatctcgatagtctccctctataaacacggacagaggctttccgtcaaactgaagtttcactggagggcgaaaaatctggttgcggtcacatttccggctctgtttctaggcagcaagctgcgcgtcatgaggttgatgatcgtagttttcagttccactcgtgcacgatctagccaatcgccatttcggtgcattcacgaaagctcgacaagacgacagtgaccatcagtaggagatggcgtatcgtcattctagatcccgacaggtcgatccatatctcgatcgggaccgctagtcttcgcgctgcggacaggtacgcgctgtgcgtcttcgaagcccgtccttaagctcgcctaaggattcgcctcgttttgagctagcaagagaccggaatccataccaacgggaagataccacgtcggctatcgtgacgtgcagggtagtgtcgggtttcatcctcgagcatcgagatcccagaattgtactgtactagtctgcgatcgccttgttttggagctcgatctcgtcaccttccctagtcgagtgctgggcgcgaattcgtccttgtccgtctccgatcgaattagacacagacggagcaacagtggagcgttggaagtccgactcggaaacactcatggtgtgaagcattactgtgctcgtgtaggctatacttgggcacggtactagctggactatcgctcacaatgtctacgaaagtcgcctcgacaggaagtctggcgaggtcttccttgctaagcactacaggtgacaacgatgttctcccgaaggtctgaatgctacatcgccgaaccccttgctgtcccgacgggggcgaaagcagatgcggcttgaccagagtggtccaagatgaacgcgggtgtcaccggtagataatttgggcagtatgaggcctggtggcggacccttgaatatcttgtcacgggatccaggtagaaattgatgaatctccattgaaaggcgccttcgtatcttacttaaacacgattttcgtgctgggaatgtcactggtagttgaacgaccaccccgcttcgacggtaaactccttggactatcggagcggtggcaaggacagtcgcgggttttgaagccgtgacttgaatctcgacctcgacctgtcatttcctgcacgttcgggacgatccatgtcttccactagacgtccggaataatctatgttctcccacggccgaagccatccgggcagctacattattgcgcaccggcctgtagcgaaatcagggctgatggtcactgcggggaaacatcgggacatatgcatcatattaccactttgttaccctcgatcagactaccgaccagcaaggtcccgatgccggttagcgcacatatcgttaggtactccgactgaaaggtttattttcaggcgccgccggtgatggttcaggtggtgtttcgagtcgaccgattgatcccgagcgatctcgcgcgctaagctagttcaacggggaaatgtgacctggctgagcgcaggtgcgcccaaggttggatccttgaggtttcgccgcagcatggtacaggactgctatataatggcaggtgttttggatcgaagtatccgtcgaatacagtcagttgacaaagttgaggtcacagctcacatacaaaccgtaactccgatcatgctcgttgcaaaaatcctcagcgcccttgccttcagcctcggctccctcaccttcgccgaggccaagctcaaatacgtcggtatcaatgtctcctctggtgaattcggcgtctactctccagggaatcccggtttcggcctccctggaaagtttggggatgattaccagtttatcgacaggcacgccatcgacacacagctcagtcaggggatcaacctgttccgactaagtttcttagtagagaggatgtgcccgctagagtacggcttgggacccaagttcaacgagactgtgagtatcatcgttatcacaatctaatatgctcccgcgactgacaggcgccagtatatggtcgacatagcactgggagctgtacaacgaggcacttaagtacattaccagcaagggcgcctatgtcatgactgatgtgagtctttgcaaggctttcgacgttgacggcgcacaatgtctcacccagaccttcgtgaccgcagcctcataactatatgcgctacggagatccttctgcacagcccatgagcggacccatcatcggggacacctctgatcccaagtcggctaccacggcgcaattcgcctctttctggggtgagatggctaagcgccttcggacgaaccctcgagtcatgtcagtgtcctgtttgcttagatttccatccgtgtatctgatactgactttgagatggacttggacttgaatagatacggactgatgaacgagccacacgatatgtctaccgcactcgtcctcgagaatgaccaagccgcgatcgattccatccgacaagccggtgggtgccaactcatcgccgcacccggaaacagctacacgggcggacactcgtggttgcaatcttctcaatcggacgagccgtcgggcgattacatgtacaagctgcgagatccgctcaacaataccgcactggacgtgcacgagtacctggactacaacttttccggtggaaatgtcgaatgcgtcaataccttcgagagcacgatgggacccttgacgaattggttgagggagaacggtctgaaagcgatcgttagcgagtttgggggcagcaatactaccgtctgtgcggatatgttgaagggagccgtagactacgtcgcagagaatgacgaatatatcgggttggccgcttgggcttcgggacctaaggtgagtggcccctggccgattacctatcgatatcactcagttcgctgacccgtttcgcatcgcaatagtggaacatctactctccctgctgtaacaactataccaacaactttggttcgctcgaacccggttccaaagcttcggatgggggtccttcctactacgatacaatctggttgcctaccatcttgcctgcgtacgaaaaatactttgaccaagcggccagggacggaaaatccagcttggaatgagagacgccgctgtcggagagagggagaagtgcagtatcaggctgagaaccaaaagagacagacaaatagtgataaatcgattgtagcaagataaagacaacaacatgaattcgggaaaatacaatatagaaaatcggagatccgttgccgactgtttcgattaccccttcagcctcttgttcagtgcacttgggctccatgagggggtcaatgtagcgacgcgggcatactgaactgagcgctgcagctttctcaccttatcgagccagaaaccgtctccgaggaatcatgcggggtcagacctcattgagtaattgatcgtgcaattgatctcgggtacacaggcatcaaggcgattttttttagaaagacatgaacggttgctgattcacgttccatataggtatcccaatcgcgaaccgtccgcgaaccgtctgcgaaagttttcatacatcagtgtcgacggtggcgcatatgaacgttcgcagcagattagcgaatctgaaagccatcgacaagatcaagatgcaatgcccttccgtatcatcgggtcaaggtgtcattacggttcaaacctttctgcccgagcccacctcggggacttggcgaatcacgtggccgggctggcgtcctcgtcgcagcggggcagcaggcgcgaagcagcccacgatgccgtcatcaccggcccgcttcgcttctggttatccgcgtgattcgctatctgataacccgaaagaaaagtcaaggcggggcacggaacccatgcggtcaatttcacacaacacgccgtcttcgctcgatcatcaccgatgtaccgacgtcagccaggacgccaggacgacgatgaccacaccacagaaccgtacgctccggactggaaaggctcggcggtgaacacggctcgggcgagagtcttacttaggctttcgaacgaggtcatcctccggcggactaatatatatatacagtagtgaatacaaagatcgcgccttcatacctccgatcccaaccttgtgtacccaacccatatcgcaatattgttatactcttgtttataccacctcgaccggtgatcaccgatatacctcgacctacatacccttagacctcggggagcccatcatgcccgtccccgctccgctcaagaccgtgctcgttctcggatcggcctatgccggccatcgatctgtcgaagtcctcgccaaaaccttgcccttgaattggagaattgtcgtgatcgaccgaagcacgcatttctgccgtgagttcctgatcactggatcagaccggtagtgctgcagacctggctgaccttgctgtttctaacttgcgttacctggcctgtcgactcgtgtggctcacccatcgcatacatagacatctacgctttccctcgtgtctcgatcttgcccggacacgagcagaaagctttcatcccattcacgaccatgttcacgcgaggtcaagatgacgcccaacgagcccacgcaggccgacatcaactcatccacggaacggtgaccgggctctctgagcggaccgtacgttacactccgttcgtccctcgagccgggtcggcgaggaatggagatgcgtcggacgatccaactgggttggaagaaggaccggaggagacgttgcatttcgattattgcatctattctctcggcgcaaagtatccttctcccatcaacgtttggacgcaccaggaagggatctttaagcgggaaccgtcccctattagggaagccatctcttcccgcgagacccacgcacacgagatcaacactactgccatcgctagcacttcctcgacttccgcgtccggggttggggccaagggcgtgagggagacgaccgagtgtacagggacgaaatccgaggggatcagctggatgagggccgctcagaggaggatcgaggagacggaaaagatcctgatcgtcggtggaggagctctcggggtccgtgagtaaccgtcgtgtggtcgagctcgagtcgcccgtactgtactgaaccgttgttggggtcgttcgatcgtcatcggggctgtatcagagatggccacggatatcattgccacgcacggtccttctcccaaaaagatcaccttgctgcattcccgatcccacctcttgaaccgcttcgaaccagggatgcatgatcgaacgatgaagcggatgaaagactttgggatcgaggtcatcctcgggtccagggtggatgcgtcgttcatcaacaagaccgagggaggcaaggtccggacgacagatgggagagaggtcgaggctgacttgatcgtgagttcttgatcacctctttgaacggtctgacgatgctgatcgacgttcttgatcttggtatcctccttcagctctggtgcactggccaagcgcccaacacgtcctacatccagcagacctacccctcagcgattaatcctacgaacagcctcgcctatgtcaaccgtcatctccaactctcaacacccaaacccgaggccgatcgaccggacccgagtgtggacggtccgaacgacctcaagaacgaggactttgaggtgctaaacgatcggatctttgtcacgggggattgcgccgatgcctttgggtcagtcacctacatcgacatgccctcgttcgagatgcgacgtcagagctgagattttcgcctgtcatatggtctgacatcgcagcgccctgaatgccggtcatacggcttattggcaaggagatatggctgctgagaatgtcctcgccctcattcgagccgaggaagacggtacacccggtgcggctcaattgaaggaatacaaggcacccccctatgggatcaaagtctccctcggtcgagtgagtctcggtcgtccacttctcgctccatcgcgtcgtcgtcctgtatcataagacgtggatactgatgtgcggcgactttgcgacttgccttgcaggacttggccattttccagcgggatggcaagacggggacggcggatcccgtttacaatttggacgatctcgggatggggatcatgtggagcagcaaggagatcagcgaggacgactatttcatctgaattcggtcggtccgtgagcgagtacaagtacatgtgacgacaatacgatggacatagagtcttacaatctgttcgatggaaataatatttgtatacaacgtggatgaatcgatacgtctttttgctttctcccgaggacctttgatcacgccgtccactgcttccgagcatccgtcagaggtatatactatcccgttcgttccgtcggtgagcgagccctctgctgcatcactttgacgcggaatacgaggcaagacactcactctgacacccatcagattttctaccctgacgttcccctgttcatccttgctgacgagcttgatcacctgttgatcggtcccgaccgggatgaacatcattcccgggctcgcgagttgggatagtagtgctgaggggatcacaggggaggcggctcctacgtgaatggctttgtacggtgctgtgcaagggaacgaggatgtcagccgacgggcttgatatcaggtgaggcgtatacatgggaacgagtgaatgaaactgaccggaaagagggaaccccagtcttccatcgcccaagaccactttgacccctttccggttgccgcctacacttgtattaccgtcatcgttatctcgcctagcgtcctcatccggacccaaaggacgaatcccatcctttcccaaattcacttcggtcatcctcgttaatccttccagatgatcgatccccacgactaatccatcgggaccgaccaacctgctgatcactgccgtgactaccctcctcgaaaccatccgcgtgtgtaccgaatcgaaccgaatatcaccatcaggatcatatggagcaaggggaccacgaccaggcgaggggctagcgcaacgggaaaagcaaagcaactcacggtacccgctcccacaccctacatcgaggcatctgtcccccggctgaaggtacccctcgagagcttccagggcgtaggcgtgcatgtgtggggccgaaatggtagctccgaacccgatggacctggatagacagaagaaacggggtcgtaatcgggatcacaaatgcgtacgaagattttgccgtgttctaagacagcagagcagttgcatcgcgtcgttgaggcgaaggatggctcactgaggagagtcttgataagcggtagtagcgtccgggacgtaatgtttgcggtcggttgatttcatcgcctgcataacggtgaccgcgatcaggtcaagggtagcgtgacacacgtcaccactttctcactcacttgtgctactcgtcctggttgaacgataatggaatcgatcaggttgtcgatcagctggatcaagagggacggacacagtaaagcaggttgatgtaagcgatgttgcgcggcaacgaaaagatgggtcaagttgtgcctgcctcgacgttggtcctgcctgtacaagtccaggccatcttgctgaagagcttgaatcgattcagtttgaaggtatgggatcgacgagcgggttgaacggcctggccttgttagctgcaaagttacgggtccaggggtcgatatgtgtgatcgcatcttgcggggttgcacttgcgctctgttcggttgccgaggtcgaccccggtcatcggtcgacagaagatgccgagatgttacgtcattcagcgcgaaacaatcacgtgattggcgtcacagcagtcgccattatagttacacaccgcggatactcgtcgatcccacgcttcttctcgcctgattactctttgttgttgatgtcgacgaccctaatgctcatcgagctagctgatcatcatcatcttgcatcttgcatcttgcatcttgcatcttgcatcttgcatcttgcatcttgcatcttgcatcttttcaaaggtcaagagtacaaccactcatcgaccctcggacctccgataagcacgagtaccattagatagcccgatctgacagcacaaattcaacctagctccgcctgccaaaatgacgtccatattcgccatgcaagtagcccatacccatcgatcaaattcctgtacgacatcagaccctggtagctgatgaacacgcctacctcatctcgtatgatcgatctcgtacatgtgcctttcgctcttctgaattcaatctggaaatggaaaccgtcatcccgtcgatactgtatcatcgcgtacactattgcgaccctttttatcgctgggaatacgaccggtacctcatatcaacccgcttcatcgcccttccgcccacaggagccgtagtcagtcccgcctacctagcctgtcacagcctgactattttttactgacgtactccaacctcttcctttcctaacaaaccaaaaccgaccagccttcaagccccgcccgaccccgtccaatgcgtcctacactcaagggacgaaacagtaccagctccggaaatacgccgaacagacgttggggagtgggaatctaaggaacgcggtcgtacttcccgagggggaggaggtatgcgagtgggtggctgtgcatggtgagtctgggtcgtaccggggtcggctcgaaaggggtcgatcagatggggttgaggagggactgacaggatgatcgatacgtcgtttatgcaccaaattctttgcatccaatcacctaccgtctcctggatacgtctgtcctacctgatcgatctggtctccatcaccccacccatttctcgaacatcgacaaaacgcagtcgtcgactttttcaaccacctcaacatgctatacgggacggtgaccgagttctgtaaccctacccgggtgagtacgaacacggcatgactgcagcaggtccctttccgacccgtcgttgcatgccgaacctgagagaactaagctgagtgacaacccgggttttcggtacgtgcgcttcgccgggatatagtgcccgatcatgaacgctgggaccaagtacgagtttttgtgggaagacgggatcacctagtaagcaagacctactcaattcccgtcgtttttttagcataccttgccaagcgaatgggaacagagtagctggctcacagcaatctcctattcggtcgctttggattggtagtaagaaacccacggcgctctcggccccgttgtatgtcgaggcgttgatgagttgggtgcagaatcaattggacgacgagaaattgtttccccagaagatcggtacgtttcccccgcttcggatccagctaccaagggttccgcccctctcactggctcggccgactgcccccgagactacactccgagactgacccaccatgaccttgggtgcatttcgcaggcgttccgttccccaagaacttcttgtcgacttgcaagaccatcctaagacggttgttccgagtatatgcgcatatttattacgaacactttgatcagatttgcgctctagggatcgagggtacgttccggtcagcgttgggtcgaatggcaagatcgaaagctgattatttgctcatacgtgcggatgacactcgtcggctgttttgcgggggaacagcgcacctgaacaccaactatcgacatttctaccttttcgtcaccgaggtgagtagcccgggctcttaaacaggaaccgagagatgatttcgctcaaccgattttcacatgtctgcatgtcggcttcgcgctcggccgatgtttccgggtcttagttcaacttggtggaaaagagggatatgatccccctggccgaattcaatgatacgatcgctggagagtacaagtaggatcgttgccgtcggcctacctcctttctcccttactttccttacctcgcctccctctctctccatctcgccacacgtaggactacgtaggggttttcgctatgatccgccttttataacgaccgtgacgtttccatgtcttttcttgttctagttgaaaatgtatcgcgacggccgtatgcccgtatgacagactgacagactgacagactgacagacaccctcctttgaaacacgctgatctaagcttcccccctggatatattagcttccgatacaacccggagttgtgtgacgtcatgttcggaagcaatttcaaggtcggttgcatttgtctgactaaccccggctctcgttgagaacacactggtcgacgaggccatgacggggatgggaacgggggaacaggtcaatcgtcatgctcatggtcttggtcgtggtcgatgcgttgatgtactcctctttcctcttgatctgatcgctcgaatcacatgaacctgatccctcgttcaatcttgcactcgtctattcgtaataccgcacccaagaccttcaacgctcaactcgctcgtcgattcctaaacaccccgtcgtccgctcgaacccctcaaacttcgccgcacagacttcccacatcccatccatatcagccgacttggactcgacttattcatacgaagaccgactctatcaacatgtctggaaacgatcaggataaagctcagaacagtaaagctcagagggagatcaaggagaaatgtttcatcgtcggtgagctgcgagcgaggggggggggggacgacaccgctacctggttcaaaatctcactttcgctctgatctgacagtctttggtgcttctggcgatctcgccaagaagatggtcagtcgaaaactcacatccgttggccctgtttacgttcgaccttacctaatcttgacgctactcccgtccggcgcgatcatagactttcccttcgttgttccagctgttcaagctagacctcttgcccaagaagaccaagatcatcgggtatgcgcgcagtgacatggataatgagaaattcatgagccaggtcgctggtggtctcgaagacgaggtgagtcggatcaggtcgaattgacctggcgctgacgatctgcgtaatgaggagatcgaagtgctgatcatcgcgctgaatcgtcgtaggacaaggacaaggtcgaggagttcaagaagctcgccaagtatgtccggggagcgtatgacgaggacgaggcgttccaggtgagactgtcttgttagaaagcgaaacgtccgtagatggcaagctaatcatcggaacgcacgcgggtcagaacttggagaacgagctgcaacagatcgccggcgacgagtttgatggagagtctcacaggctatactatgtgagtcgtccgggtcgtgttcgacaggctcatactgttctcgctgatcaccatctgtacctcgatttgcagctcgctgtccctccttcgcaatttacctcgctcgcccagatgctggccaagaacaacaagtcgaccggttctaaatccaacaccaagaccttgtccagtcggttggtgatcgaaaagccgttcggcaaggattcagagtcttgccaaaagatgatgaaggacattaccgaggccggatgggagcaaaaggagatttaccgggtggatcatttcgctgcgatcgagacggcaagttcctctgtgctagagccgtagcgccggattattgacgagacgcacgcattgccgtagatcaaacaactcccctacctcatcttcgcccagcctagcccgttctcgcctcacagcctgttgaacaaggaccacgtgcaggccgtgatgatcgagctcaaagagagtttcggatgcgagggacgaggcgggtactttgatgagtttggtatcgtccgggacgtcctgcagaatcgtgagtgccggccgttctacttcgatggcgtgatgtttcgtcgcggacgctaatggccgccgtctcttacggcttgcgatctggatcatagactttatgcaggtcatgaccatgcttgctatggatcgacccgactcgctcgatggtgacgagttgagggatgaaaaggtcagcggctcaacatggctgcttagatagcaggcgttctgaccgtgtcgtcatcactatgctcaggtcaaggtcctcaaatcgatcgctgctgtcgatcccaaggacgagtcttcctacgttctcggacagtacaccaagtccaaggacggcaagaagcccggctacaccgaggatgagtcggtagagaacaaggaatccaagacggcgacgtatgccgagatggtgctcaagatcgacaatgagcgatggcagggagtcccctggattttgaagagcgccaaggccatcgaagaggacattatgcgggtcatcgttcacttgaagcctcatgacgatagcagctttacctcgttgtacgaaggtaccaaacccgccgcgctcgttttcgagctcttcgagaccagaaaggtctactttagcatcaactcgaggaagcctggtttcgtaggtggtcctacgaggagcaaggtcgtcttggactgggactcggaagaggccaagaaggtggggactagcttggacccttatgccgtcgtcatcggggaagccattcgaggtcgagaggagaactgtgagtcgggctagcgtcctcttatcccatgggtgggtgatctgatagactcgtgcctgtcccgattagtcgtccgggaagacgagctcgaagaagcttggaggatctttaccccgtaagctcggcgtctgacgtgtatcggaggctggcaccccagactgagacggcccaacacatcttcttgcactcgataggttcctgaaacacatcgaatccaaggaaggccccaagcccaagccttacgaatacggttcagagggacctgaaggattcaagaagtttgaagaggatctcggttaccaggctggattgcagtgagcggcagtgtggtgatactttacggctatgcgagtcaagaaatgccaggtaataacaaatgaaatgtaatcggcatgaatgaaacgtcgagatttgaaattgaaatcatgcatatatattgaacctgaagggatgatggtcaaagccgagactcgtcgttgaccggatgaaaccgatcggtcgatgatgcatggtcgagcgttcaaccagagtagggacaggtgaaccgatagcctccaaatgaacatatagtatcgccaccgtctccatttgtctactctgaccgtacatctgtctctatagatcgaatgctccaagcacaatgtcaaactcgatagatcctcaagacgactccgcaactccggccgcgtcatccacatccccgacacccatctcggcgctcttcccacccatcatccccaacactgcctacctcatcgacgacgactcgcaaccgatcttacgaccatacaccacacaacgatgctttacattctgctcgcagtcttctgtgcggagggataccggatgggacccagtctgtcgagcggtatgctggaaagtcgatcggagcgacgagacgaataaaccgcggacgcctgggtacctcgatcgtcaacgagccgaacgggcggaaagttcgacgtccaccttggctcaacggaaggctgcgcatgtcgtcgagccgtccatcttggacgagttccgggagagcgtctcacactggatcaaccaacgctcgatcaccgccttcaagggcacactggaagagatggtcgagatgcaacgggaaggtcagcgttacgatccggcttgggatcaacaggggtctttaaagtctcaatactttgactcgatggaccgggcgccgagttacgaacatgggcgagcgcagaaacgttgggaggaaatgtcggacctcgagtacgatctcaaggaggcctatgcgaaagagctcgcaacggccacggcagcgcagtctgtggaacaggtcgtcgaactcgctaccccgcctgtccgaccgacgactctggccgagagacagttcatgaagctggtcaaggaggaacaggagcatctcgaacgacatcaaaagaaccggcaactcgcccgttctttccgcgatcgggatccatcaaagttcaactaccactctgaacctttgccctctggcggatcgcatacgactctacccctctcttcgctcctcatcaccccattctacgctctgagggatcggacgagcttcatcttttccccggcgtttcgtctgggtaaaatgtacgccgatacgtttcgaccggacgagctgacggggaaatcgacccaagtgagagggttggaaaagatttacgatcaggtgacgagcggcaaggtgctcgagtttggaggcaagtttttggacaagtgcggcgaggtctggggagggtggttgggtttgggacaaggacggacgggcaaggaggatggtgggccgggcaggggcggtggtggagagcgaggccgaaaggatgaataggcgacgaggggtacggaaccagtctagagtatgacacggataggagaagagcatcgacttgaaatgtatcgcacgcaatccactcttgtcgaccatatttgcatacatcacccctgttcgtctcccttccgccgcgctacactgcccatgggcatactcccgacgactcggccgttcctcccgtgcgccaccagatcgggttatacctcccgaccgtataaggatcgatcacttgggcataccagacccttttcaggccggtcttgccgagacaagcgaaattctccaacggcgctcgatcttccttgcgcctgttgtcatcaagcctgaggaacgataggagagtttgccaaagctgtcagctggcaagactggggatgtaggtcgaaagcggtacgtaccctctttgatcggcatcgcaggagatgaggaacctctccgctctggaaaacccgtccttgttcccctcttcgcccggtcgggcgatgccgctatagagtaaaaagatgtatgtaatcagcagatcaatctgacggggatgtaaaaggaatacatactcaaaggtcacgacgacagaatttacgggaaagtcctccggtttcaacttggattcctctcccggtggcgggtatctcaggtcccccttgataggttgactggggttcccgatatcctcgtgacaactcggagcacaggcgtactgaaggtaattatcgtacatcgagtttcccagacgcagtttccagtccggagggggtgccatgacgcaaatgacgacgcaagtgcccggtgtctggggggctagacggtagttgctatcgttcgatgcctggagactgggtaggtcgaggaattgtacgccttggccttctttcccataaggttcactgatggattctttaggttgggggaagacttcgtcgtacgatttcaacgagggagcggccaacgacgtggtcacagacagggcggcgaggagaacgtggagtggatgcatattggaaagggttggaaggaggtgttatattgacttttggccgatattgacttttggccgatatcgcttggatgtgcatatgcgatagatatcaacagaggctagaaatactgcatacatttctcacgttctgaaactacgattatagtgaatcaaaggaaacgactgaccgccacccaaacacgaatggtgtgaaacacgccgccgcctcgaaacggatctcatcacgtgaccttgtcctcgcaacgacggcgactaggagagagcgtggtcgatacaaaagttggagatcgatagacgttgcaattacatcggctacggtccgactttaagcagcatcccagtcaccatgaacaccacgcccctcgccttgctacgaacgactctgcgggcccgtgagccgctcgtcgcttcgctcgtgtggcagagccgatcccgagcctttggatcgacctcgttcgcgagggaagaacaatccagctcgacaccgactcctaggaatgccatcaaggatgccgagagagccttgtcgagggctcagaaactttccaaaatgtcgggcatgtcggcagtcaggcaggatcaacctctgcaaggttagtcggtcgatcgattgacgtgatcgcgctcggtctcgaccgctgatgacctgcaaacttgctcgtagacattgcggtcctgccaccattgcgcaagatcggattcggtgctgtcagccagaagaggaaatatgtgaccaaacggataaagcgtggattctacaccgctcaatcgttagtttcctagcacgccctacaggtcgacgaagagcccgcctagctgatactcaccgctgctcgtggtacactcctagcatcgccaaaatcgtcacgcaggacgtctactcgatgaaatcctacgatcacccgtacaagcgattctggggccggatcgccggattcttttaccctcaaaaggccgcgtccggactgttgagccatttcagcaagacgtgggaatcatggagcaaggccatcgccaggtcagtctgtattattgattgcatcgaagatcgtgaggcaagccgactgatctcatctttcgtctccgtctccgtctcccactgtggaccaccatagcggcaacgtcgacaagctcaaagagtactccaaaggcgccgcctttgaatacgccaagtctcgagcatcggcagcgtcttcctcgcaggggagcaccaggatcgattgggccgtcaccaaatacctctctcctccccggatcgtgcacgcgcgtaactgggtgatcgatcccaagactcaagcagaggtcgcccaggtgatcgtaaggttcgagactgaacaggtgagtcgagggatcgagcggtgtctgtcgtaaacgtcgaggtttccgctgatcgtctccccgtcacgcttcgtcccgcagaccctgacgatacatcaacgcaataaaccggccacgacccggagttcgcggatatccgagtgttgggtgtttgagcgatacctcatggaccccatgtcgaaatggcagatccgggacaaggtcaccccgttcgccggaggcgagatccccgagaccctgatctagacgcctggacctcgcgctgtagtcgtaatcatacatcgttccatatagtacaaccggctgcgccccgcacgagttaaagttcatatttggcgattgcagactacgctcgctgccgcttgttcggaccctcgccatcatcgttatcggtcgatttccgcttgctccctgttgtcgagccggcagcctgtgcctcgccgccttcggtcccagcagccgcggcctgcttttgcctttccttctttccctttcgcttcttggccggtccgctcgacgacgacgaggccttgccatctccacccttgtgaccccaaccttgatcctgaggtcgacccgacgaagcctcttcgtcttcgggcacctctccccactttcgtctggccaacttggccttgagctctttaagtcgatctcgcattccacgaccggcggctccgacaccggaaccatggcgatacggcgcgtagtgcttcattcctaagaattggttgagctcggcgtctgtggccagcaggatctcggctggcgtcagaccgtagtcttgcggcgcagctttttgatacttgaatcgggtcggcaaatcgccaatctgttcgcacgtttacggctgttagctacaggctgttgtcgtcggtcgatttgcgagtgtgcgccgactcaccatgtcctcgtagtcgagtttcttgtactcttccaaagcctgcttgaccttttccttttgctgagcgaccgtcaaaccttcttcatcttccagttcgacgtcctcggcgcgctccttggccttgcccttgtcctttttcttgttcttcttttccttgcgttgtttccgcttggacgtggcgtcgtcgatcgagataaagtcggcgtcctatcaacgcggccacgggtcagtgcgtgattcgtgggccttgagctcggggcgaagctcaccatgttcaaaggcggttcctcgtcctccatctcgacctcgtcgttgtcgccactaggcgcataagcctgttcagtctcggggtaatcttccgcttccccgtcggcgtaatccatcccgccatcttctccatcgttgtcgtcgccgtcatcctcggcataggccgtatcgatatcgtcaccccacgttggcttttcgtcctgtccatcgcgcaaaccacgcgggctcgtatcagcactgttcccttttgcacggccaggggcgatctcgcccacgacgactctcacatcgtccaatccggcttcgagcaccttgtccatcgcgcgatcaaacacctcttcgtcccaatcgccttccatctcgtgttccaacatttcaaacgccttgtcgccgagctctttcttgaggatttccatccgcttttcaatctctcgacgcttctttcccttttcccgcttggtcttttcggcgatcgctgcggcctgttcggcttttctctccgccttgagctgacgggccgtctttcgcgtctcgtctgttcgtcgagcggtcgtcgtcaagtttctcgcatgggtggtgatattggccgcgcccctgtttgtcgacattgtcagctcgtcgattctcgtgctctcgtgcaaggggcgttgcgaaccggggcggggggcaaaggggacttacggctcttcgaacctgaaattatacgtattctcaaactcttccgccttttcgtcgaaatcgctatcgtcctccaaggtcccccagggcgtgtcaccttgctcgtcaccagcggcggcaccagcggcggcgtccctcgaagtcctgggttgttgtctcttgggtttaaactcgcccgcatgagagtttgtgcccgcttcgtccgacgggtcgatccagcctcgattgaggatgtaactacgatgacggcgggacggggccagagagagaggacgtggagggtgagcgatcgatcgagggcgatgacgatgggactagggtggacggggacgtacttcatcaagaactcttcatcatcatccttggtcctcacccgcttcccctcctgctcctctccttcgagctggaccgcttcctttccccccgtgggttgctgctgctgctgctgttgttgttgctgaatcatcctctctgggaatcctcccatccctagaatctccctgacgccttgttcccctccagcttgttgtaacaagaaatctctatattttttcgcatcggcgtcatccacctcgacgtcccccttggtaaccaaaaagtcctcctcctcgtcctcctcgttctcgtccccggcttccacccccgccctcgcgtccttcttccccgggatggccgtatgaaacgccttggtgacctcttccctcaacctcttttcttcctgaacatgggtgagggggatgagggtatccgggaggacttcggggagggtggacggatcccgaaagttgagtcgggaggaggagaggagggcttgtctttggtgatctaggagggtgaatttctatcgtcgtccaggggatgcgggaagggggagggcggagttgggtgtcagagggtcaagtcggtgtggaaagggagggtggctcgagacttaccttggtcgcctgagctctagggtgattcaatttaaggttctcggcctgtacactagtatccttcagagcctctacaacacaagtccaggtccaagggaaatcccaatccccactcgaagtcattcagtgacgtcccgcactcgaccgcaaaaaggctcggctcggctcggctcggctcggctcactcaccctcgatgaccttttcgtccccatagaccccctcgccgctccttatcatcctcaacgtcctcaagatggcggcatccatggccggtgtcaattcctctccatactcgtcctcttcctcgtcggattcgtccgtctcgtcatcgtcgtcgtcgtcctggtcgagatcggcttcgagttcctcgagctcggcttgtcgttgagccgctcttcgtgattcgacggcggtgagggcagcttttacagccgggttgatggtggtagaagaggaagacatggtcactcgtgtggtgtgtgttcaagtgacgtcgtaggggtagaatgtatgggtggggttaatacgatgatatatcgatccatcccatcaacgactgcactaggtacaccgcttgaccggttgaaatctcgattgatcacgtgatcacgatgtcaattacgtaatcaacccatcaacgaccatccgggaaaaagatgacaacttgtactttatctgggaatcgaatgcgcgcgacatcgacctcctgctaggtaggtcagggtggacttggtcgtctttcaagaactcaaacacctttacctcgacagagatcagagatcagagacgtgggagggtacaaagagtttgctggcaaacttcccccctgtcctctctaactgtgcccaccctccgagcccttctgagagagggcttgtgagtgggaccttgcgagataaggagttgctagataattgggcttaatagagtatctctaccgctacgccagtaccatcgccgttgttacagctattcgctcactcgtatatacattcaaaagacatctctctggttcgaattcggtttcgacgttcagaccattactgatctctacaaggtccttgattattccgtatcgtcgttcatctcgatatccatcctctgccccccggtctgttgttgattttttggggaagaggagcaactcgtcgagcatcactactagctactactactgcacataccacgaaacatctagaaccctcatctcgaccggaccaccacacaacatccttgaacgaccaccgtcaccaccaccgcaccgcaccgcactgcaccgcaaaaaaagaaagagaaacacgcccgggatgaaagtcgtcgccctcctctctgggggcaaagactcgtgcttcaacatgatgcactgtctggccaacggacacgaggtcgtagcgctcgccacgttgacgccagaggaaggggtcggtgagtcccgagttggggtccgacttcgaggtcgagtccgagtcggggtgaatggggatgggaatggggggtcctgcacgacgaatgatgaatgacgaatgacgaggtcgggagagctccaagtcgaagtgcacgggctgacgatgctcctccctcacatcctaccatgcatatgtgaacctgcccgacacccgctctcaccctcgccttcgtcctcgaccaccacacaacacgacttgacacgacccgacgtcgcacgacaccgcacgacatggctccgtagacgagatcgactcgtacatgtaccaaagcgtggggacgacgctcatccccctcttggcgcagagtatgaggttgccgctttatcgacagacgatccgggggaaacctttacgggtcgggggaacgtatgggagtcggaccggatcgacaatgactttgacgtcggcttcgacttcggtttcggaattggaattagaatcggaatcggacgagggcggggtacggggggatgagacggaagatctggaagtcttgttgaggaccgtcaaggtgagcttgccatcagactcgggctcggccggggaggactaggtgagctttggtgattgccccttccctccctgcgtcttgccttgcaccgatccatgctcgtccccgtcaaacaacaccccggagctaacccgaaccgacccgacccgggccccctcgttcgacctatcgaacgacgtcgcagtcgcatcacccagacatcaccggtctttcctcgggtgccatcctctcgacataccagcgctcccggatcgaacacatcacctcccgtccgcacatctcactcaccccgctctcttacctatggcaacaacccgaacgcccactcgtcctctccatgatccgttccgggctcgtacccgtcctcgtcaaagtcgccgggatgggcctggagacgacggatgtgggtaggaaattggaagcgatgcagacgaggttggagaggttggaaagggattgggggtgtcattatgccggggaaggtggcgagtacgagacaatctgtgtggatgggcccatgttccacgatcggatcgtattgtgagtcccgggtcgtggcgtacgcacaaagaaaaagagagagccttggctgattcccgtatcgtcggtatcgacctggacgtggacgccccaccccccagcgaagagacagagacgatcatcaccgatccttcgcccgtcgctcacctccgcgtcatcaaggccaggctcgaaccgaaaccgggtcacgtcgtccctgatcgagccgagatgagacggctgatcggtctggcggatggagacggctcggacgtccagcggcaaatcgcagagcaagaggatgcagaaggggaggacaacgacgaggctctgttgcacgccgacgttctggacgccgagtcgagggccatgctgcgggtcgtgcgggagggaatgtcaaaaacgcccatctcgacatccatgtctgagctggacgagcggttgcaacatctagatgtcgacccggacgacacgatctcacccgacgtgaccgagctgaatcgacgggggagatggtttggcgccgtcgtggagctcgttcggcagggcgaggacgaagacgtcggagcgttgatgcgacgacaattcgtcgcacttcggggtaagcctttcgtcgtcgcaagctacctcgacacaccccctgcttacatcctcgtcgtcctgatgactctgcacagacattctgcaacgagcctcgctcgactttaccttgatccaacatatcaacctgtacctggcacgaatgtccgactttcccaccgtcaacgacgaatacattcgatactttgggtcggaacctcctagtcgggcgtgcgtcgggatccatctcgacgcacaggccggacagctctgtaggcttgaagctaccggttgggacgatcagcgagaaacgagaaacaggcgagcgggcctgcatgtccagggcatgagctattgggcgccagccaatatcggaccgtacagtcagggagtggtcgtgagtcgcaggctgatccagcgcatacaccgtttagtcgctaagccttctcgtaggcaaacaatcggttgacgatcgccggacagatcccgttactaccacggactctgacgttcgcttccccacgtgacatcacctttgacgctttgctcgccttgcaacacgtctgcaggatcatcgaggtgatgggcgattcgagcaaaggaggagcaggatggatcggtcgaggctggatcgagggcgtcgtgggatggtatgtaggggacgagaccgttgagcgcaccatgcgcgcagtctgggacgagtttgccacacgcgtacgtctggcctcgtaaagaatgtcagtcgagcactcggctgacattgtcttcgacagcacgcttgtcgagatacgcctgtgctctttgtagccgcccgagaattgccaaaaggggcatccgtagagtggcaagtcactcgtcacactggagatccaagctggccagcagtcccccgcgtacagatgcaggagacgaatggcgaagaaagcagtgacgacgacgaggatgacgagacggacagggtcgtagtcgcctacgcgcgaggtgagcatggccggcgcgtctcagatgagactacagttgaccacagctactgcgtttcactattcagattcggcacggcaaagttgtagctctctttacggcgattctaccttttcggtcaacacgttccaaggtcggtcatcgttgtttgtgcatcgagcataaagatggcttaaacgctctttcctcttgcagaccaggatcaactggccaaagcgctcgccgtgaccgaattgaaggacgacctggcggcatcctattcagcgagattgttctgcgattctcggatatcagccaacaaaggtggggtcaaccccgtcgctccgaatcattcacgcgctaaagctgatcgaatcgcacttgcagcgagagagcttgcggctgcggtcaaggatgcgagtggagtccgagtcagtgtggtgccagtcgcaagaataacggaccatgctggacgagtttgcaatggggccatcgtgactgccgggaacggaaggcggtgaaaatctacatgtcgccgattggttaacataatacaacctctaacgatcccagggaaatccgcacatatccaagcaaagatgatcatcgcttgcgttcagccttccacttcatgactttgccgtgatgtacgacccgggcgtctgcatcatcgtcatccccattatcgtcccgtttcccctccctcgccatacgtccctttctcaagctcggcaggacgatccgctccgagtccttcttcttgatgacaccgcccttgcccatcatctgtttttgcaattcgatctgagtcaagaccgatcggagctgtgtcagccgcttcaggcgttgttgcagctcgagcaggagtaggtgtcgatgttgctagagcacgatccagagagtaagggtcaattcaggaaggggcgtcgacggtggcacagcgagactagggcgactcacgtgggcttctctttgaaggtccttttcgatccgcttctgttctgcccgcttgacatccacctccctctctcccatcatatcgacgtcatcctcgtcctcttcctcgtcctcgtcatccgatacgatcgcgcttttgggctttgcctgcgatgcccgtcgattcgtcgtcacccaaccgaggtccaattcctcgaccgggtctgaggctgatgcgtcggttccatcggatttcgatgtccgaacggtaggttcccattccagcactagttggttgaaccgcaaacgcagcgaaaaacagtctcagcgagcatgttcaaaaagccagcgacggatcgatccggtgcactcacgctcgtccttgtcatcggtaaagaccgtatgtccgcatccgacctgccccgtctccttgcccttgcccttgacactcttgcttcgagcgatcaatccggcttcttccagtgtttccatgtcgacgtcttccagttcctcggcgtcctcatcggcagactcgtcgccgatgtcggaccagctatccagagcaccggatccagatggagatggcatggaagggaagagggaagtgaggacttgaagctgggtcttgagtgcagatattttctacgcatacacgatagcacggcgatcagctctggatttctcgttctcgctaggctttcccctcatgttgggggctggacgtacgctctcgtccttggcgatggccaacctcacgtaacccgcatcctggctcttcaacaatttgacctcgtccactcccaaagtattactcgaatttcgttcttggacgtgcacccctccctgcgtcttggctttgatcatgccccagtaaaactcatccttgttcctgaaagcggccttttcccggagacgcttcagtcgttcctttttcgacttgtagtctcttgcacgcaggacataatctttcttcttttcgagcagtccgagcttggctcgagctagaggctgagctcgctctttgtgattacgacgatgcaccgagtctgaggcggtaagggagtaggcaaaagtcagcggaagcgcggttccggcaggtcttgacgagacttacttctgatggaagatccggccatgactgaagtttgtgatcgagagttagctaagtataatggatgaagattctaggtgaattgggatcaggtaaatcgattgaatttcggtttctcgactccctgctagttgttcaaaatatcatcgaaggccgaagtacgatcctcgactttgttatcaattaattcgagaatcatatcacaagcgcgcgtaagccatgggggcgatgccgtaacaacacgacaagcggggaaatgagcagatgacgtgtattattattatttgtggtcaaagcagtatgtattcatatcactagttgccccccgctccctatacctcggcgagcttgcgctttaaaaactcgacaagatccgctcgctggacggtctctccctcggtcgtacctccttccttaccgagctgacgtcgaactttggcggtcccggtctcgacctcgttaggtccgaggatgacggtgaacggcgtctggtctcggtcgcaagcgtccagttgggcgttgggcttgggcttgttcttgtacatgaactcggcctgcaagcagaaagagcaatccgagtcgtcatcgtcgaaatcagcacttgatcgagtgtgtgcgtatgtgtgatgatcgcggaacccgcgactcaccttgatgccgccatcccacagatccttggccaacgccatccgctctttcaacaatccgtttcctcccatactgacaatgtagacctcggtctccttgccccgagcttcccgctcctccctctctttacgcttttggaggatgatgctgtacaccctctcgaccccgaccgagatcccgacgcaggggaccttgcccgctcccttcttgccgcccgcagcctcgctgaacataccgacgagctcatcgtaacgaccccccgcggcgatcgaaccgacaccgacggtcgactcgtcgacctcgtcctcctcgccagccttctttgctttcgaaggtgccgacgaggaagcctcggcagggacggcaggctgggttttgagaccggggggagcagacgattgatgaatggcctcgtagatgatcccggtgtagtagtcgagacctcgagcgagactcatatcgaacgacatctacccagggcaagggacgggcgggcgttcaggaccatcaactcgtttcgggtgacgatgcatctcgactcaccttgtcgagcacacccatcacgtcgaggtatccgaataacaactccatgtccgccaatccctcctttgccgacttgaccgccgtcaacttttcgtccgacttgagtctctccaggatctcccatcctttacctgcatggacattcaacgagatgataaattcagcgaccgaatccgatatcttctgacaggagcatcactcacccttcagaccgacgtactctccgatcttgtcagcgatcgcgccgtcgagacccttgtccacggtcatctcccgcctgacttcagcccagggggccttgtccagcttgtccacggcggaagagatcgctcgggtcttgtcgctgggtactccggccagctcgaagataccgtccaggatctttcggtgattcagctgtgacgcatccgggtcccgcgttaattacgagcgagagagctgtcgcatcacccaggatcagcgactcgccttgatggtgaactcgccgatgtcgagggcggtcaatgcctcgcaggcgatataaaggacctcggcgtccgggaccatggcgtcgtaggttccggcaatatcaaagtcctaatgccatgacacgcaatcttctctcagccccactgtgacgtttttccgccgccgttcctgaatccaagacttacacactggtagaactctctcatccgacccttgctcatcacgggctgatcccgtcggtataccttgccgatatgatacctcttcatggcgacctgagagttcatggccaagtacctagcaaacgggacctagaaccgcgatgcagcgagataggcaggcttggtcgagctgtcgtagatgtataggcaaggaccggctgggcttacggtgagatcgtacctcagcgaacaaagctctccgccttgatcttgcaggtcgtagatcagcttcgagtcctcgccgtacctgattcgccataattgatccatcagataccgcatacagctcgctggttctcgtcgaccgccgacctactttccagccaagatctctttcagctcgaacacgggagtgtcgatcgtgctcgctccgtgcttgacaaagatgctctcgagcgtgttgaagatttgctttcggagcaaggtagctgaaggagcatggtcaacagttccctgaagcgtaaccagaatccaccagttcagctccttgcaactgtacctgaatgagcctaggcgccaactcacctttggggtcttcaagttgatcttgcccttgccggaatccttctttccggtcgtttgtccgaccttcttcttgaggtcgagcatctccttgagctcggtatcacatggcttaccgtccgtcttgagctgcctgatattatcggctagctcggtgattctagccttctcggcctcgaactcggtagacattttgtggtttctcgtcgaataggcgagctgtaggtgcggtcgcgggcggaggagaacggctgaagtgattctcggtgtgactctacgtgcgaatccagagaaaagcatgcagtatgatagatacagtgatcaggtatagcgagtgcggtcgatgggtgccgttgtcgaatcttacccgaatctttggctgctctgctttgatgataagtcaacaagtaggttcgtcatttcgcaaggttgaaccaattcgaagcgcggttcgagacgctcaagcgcattcgttacgggatctcgtttcaagtcgttcgaccgttcctctctcctcttctggtcgcatttcgcatgatgctagatgagagagatgccctcgtttgttgccgctcacactttcgtgtgctatctatctcttcggtatcagatatcctccctcgctggattcgtctgtctcgtagaggcggtgctagtcgcaaatctgctgcaagctttagaacaggctcgtgcatcgtgcttgaccgaagttctaagaagtatcggatcggcttctaatgtaatgaaccttgtctctcgcacttctcggtctcggggttccgaactgtttgtcgatacggattggacgagacctacccgtcgctgtccatacaacctcgagcgaacccaaaattacggtggctgcctgaaagggctttctgcctcttgaccagcttcgcattgcagctaggtaagacctggcacattacatagagttctcagcctaccgtccgctcttgattgttactgtgagcgaccggatatcagggcacgagatgagcgcgaccttctgcgcgctatgaggtgtgacggtttccatccccgcccacgaaagccccgggtcaacaacctcttatcgatgcgtagtatggatcattcgttctcggcttgcggaacatccttattgagtggcatggtcggtctacactcttcccagaagaatcagtcagctcgagcagctcagcgagacagaaactatcgggcgccgtctgtaggtatctttgctcgcgtctgatgggggatgggggtggggcattaggatgtcgcgcagcggacaaaaaagcacgaaaaaaagttatggagaaatggcgaatcgaacgccagacctttccaagataagctagatatgctaatggaatgttataccaactaaaccatatccccattgatgttaggatacttgtttaaacaatatcattacgtccagatgaaaggcagtcactgccggcccctcgctctttcgccttgttccttacttacataccgctgcacagagtaagctacacatcacatatcgccattcttcccccagtgtcccaggccttaacgcactgctgcagactgctgaccagaacggctgcgattcgaacgtgttctctttctttcgcgtgtctcatagctactcgtgttctcgagcgtagaatccacttgaacatgtccacgaatcaataacaaacgagagcacagcagccagacttccttccctccccccctttcccccgttcgttctagttaatgctcaacttcaaatcaccttcacctttgttaccatcgttgtcattgtgtttgcgatatatctctcatcggctgttctgaaatccttggtgagtgtaagatcctgccgcaagacccttttcatgctagctaatcgacgaaccccatttgatcgcgcggtgcaaatcgtctcttctcgttccaaccccgttccccccatgacttgctcatcatcatcgatcaaaagttggagtctctaaagctttcgacctactccgttcggcttggaccctctactcacctacattcctttgtggccgtcactccttgaaacacatccgacctatcacgctcgttacagaagtttagtttcagtcgactcatcaatttagcacactctccgaccgcctctcgatcgacatttgcgactcgtcaacgacacagcaaagcaagaaccctaacatatcgactacagcgacaaccttgaatctagttgatattcgccaaacaacgaccgagccgccatgttgaacaactttctggcgtcttcttccttgttcgggttgctcctggctagcaaagcttgggccgggatctacgtcaccaaccccgtggccgaaaccgtcgcacagtccggtcagacactgaccatcaattggggtgagtgtattgaatgagccccgtcctcgtactgcgaaacgtgcactaacgggatagacgtctcgatcatacagtcgacgacggtgtctaccctcttctgggcaacatcggagcttcctccatcgccctctttaccgggtccacctttgaacaatcttggttggccaacattgccgaggagattgatgtcagtaaagtaggcaccgtcaactgggccatcgacccgaatgtcgggccgtccggtgcgtccatttcgactcgtctaccactcggaaaacaaaacaggttaggctcacccatcggtgttctttttacaggaaattactacttcatcaggttctccagcaagaacctcaaagactctgccgaagccgcttacccgcatacggcgtattccgccaagttcacgtacgtccccaaatgtccccctttgtgcgctctttcgccttgacaagtacgggagctgaccctttgtcctcgcggtctggcagcctgcaaaacatgtcggggtcctttaacggcaccatcctttcccagctcaacgcgacgtcgtccgccgcttctagtggagccggagccaacgtcacttctaccggagctggggcgacggggacgggcgcgtctcagggaggggcgtcgagctcgggctcgaatgcgacgagttctgcgggagatcacaagtcgtctgtcgcggatagcatggtgagtgacgagcgagcattgtgatgactatagatactgaccctcttgctcgttgacatgccgtccagtccacctcggccaccctgccccgctcgacatcttccggcagtatgacccgttcatctcccgcctcggcgacgtccaactctgcacaatccgcttcgcaatcgagcggatctgccaactcggccgccgcgttcagtagagaactctcgcacgcaggtatcggagccgtggtactcgggtgcatgggcctcggactggcgttgtgtctctaagtgatcccacttggctgcaaagaggagagagcccccctgcgctgagcgccagagaagtcgggaacggatacgatcatgtccctcccggactctgcacgtcctttttctcgctctccccttgtactctcctttaatcaagttgtaatccacgactcgtctcgacgtccggcacgcggcaacaatataaagccgacatatgatccgtcgaactgcctacacatcggcgccacgcgtgccccccccagactgatcaattccaatgcatcgtatacacagagggacaccttggcatgcccgacgaggtgtgtcggtcgtccctcgcacacatgaaccgcagacaaagtcgggaaaggaaaccatcttgccacactaagctctctaggagactcgcgccttacgcctcttgtgcgaccggtcgacctccggtcctcccgcctcccctgccacctcgaccgccagcacctccctccctcttttccctctgctcgttgccctcgccctgggcttttcggttcatggcgaactggatcgcctgtgatcggaaggccaaccctcgggtggtctcgatcagggtttgcgtcggggtaggatgaggtcgcgagatgtggagcatgttctgtcagagtggcgtgtcgatcgtcagccatcgccattgccgttgccgtctgccactcgtccacaccctcgactcacggcttgcaggtcgatcttggcgtcgattcccatcttggaatccctgatcaagttgacgatccacttttcaccctcctcggccgacaagtttagcctcgccgacaagtcgctgtggcgatggcggacggttcgagaaagacgagaaagcaagatgagaaccagacgacgttagtgatggtgcacgactcggccacgcctgacgctgagggactgacgtgatatcgatcctcctgtgaatcttgcaatagacctcgctgaccaaccacctagcgccctccataaactcgtcgacgaacccgttgaggaaaaagtcgttttcgaggatcgtcttggcatcctttagcttttcctgcgccttttcgaaatcaaactcgccgtacaggtccgagaggaacgacgtgatcgggtcggcatagtggtggttctcctggaggacgatcttggtgatctcctggatggggttcctgatcgaccttccggcgatggtgaccttgtagctgttcgagtttgtgcggtgggtcaagatggcggcggcgacgaggtaccgggtgaggtgggggcacgaggtctggagcgtgttgaggtaggcgggcgagaggaaaatgtcgagcagggcggcgcgaccgtcttcgtggttgaaaaacacaaagagaccccaatggagcaaccaactcctggcttgcagttgaacgctcggcttggcctgttcctcggtcgaggggttgtcgatcatttctctcaaatccttgagttcggacaatgcggcgtcccattcaccggccaacgtgtcgctcaacagttttccccagtgggccgagacgttgaggtcgagcgagggcgagaggatgaggaaatggtacaggtacgaggacgctccgaggtagtctccgtaggtgtactggtagtgaccgtagtagtagagcgcgttgacctgttcgagcgtgagcccgtactccctctcgaggagttccatgttcctgagcttgtcgaccgcgcccttgagtcgatcgaccaccgcggggtcctcgatcacacggaggacgggagcggcggattcctgcaacgaggccgtcttttggatggcgagcttgcgcaggttttcaaagtctgccgaggggggggggggtccgatcgtcagtgacgggcgaggaccgacctcctgtcgggaccgggggggaggactcacctggcaacccttgcttgacaccatcgaggtgcttgacctgatccgcgagctgctcggcatagtcgatcaagttggtccccttggccaactcgtacctgcgattcgtcgacgagatcgaggacgaagacgacgacacaggaaaagaaaaaaaaccgggcggcgatatgaatgagcctctgatcttcttccccgggcgcgtggctggcacgtcgcactcactgagctttctgaacctgctcgacggggtagatgaccgggtcgagttctgccaagtgcgccaagaggggcaaggcgaggtgtcgatccaggtaagggatcagggtctgtcatcggcgtcgacatgaggcgtgtgtttgaggggtttgttgatagcgtccaagaagagccggcatccggttcgattcaggacgagacaaagacgatcgtcacatatcagttcgtccgtccgtccgtccgtccgtccatccgtcattcgtccgaggatgatcaccggagttgagtgtagtgccgtgcatatgatcgacaacaagtccatcgatcgggggtgatgaatcatatcgaggaacgagcacggatcgaccggcaggtgcgatgcggacgcggatgggttccgaggatgatgacgataaaagaagatccagcgtagtcgtcgtcgtcgtcgtcgtcgttgtcgatcccgtggaaaacccaagaccacacgcaacaacagcccgcgaatccgaatccgaattcaagtttgagtttcgagtttggaatttcgaggttgtcgagtcgagatgcgaatgccgaatgtcgaaagacccgtccgatccacgccagaccatcccggcgtagacgcatgattgaagatcaggtcgtatcaagaatacgtgcagtggggggggggagttgcgggtgttttagttattgttcggttgattgattgtttcgagacgaggagatgtaggtgcaggtgcgaattcgatttcaaaagtcgagagtcgaggcccggcgaatccgatccgatccgagtgaggttgatatcgatgatgagagtcaaagtagacgatgacgatgacgatgaagatgccatcgacgttgacgttgacgtcgaggtcggggtcgagagaagaacgagcacgaaggggggtaaagagtaaagatgcaagttgtttcaatcgtcagctttccccgtccccacaactctcttgctctgaattcggtggtgacgaccaccaccaccaccacgttctaggaggctagactgacctgggtaagatcatattccgccatgatttgatttttttcgggcaagtctacttgttcttcttcttctactgtttcttttttgtgtcctttttgacgtgtgttgcctgttttttttcccttcgtgtttcccggttatgttcgcgggggggggggcctaacccctaacccctaacccctaacccgaccagcatttcaaaaacgtttacagcccgcagcctcgcagctccctacacgacatctgtctttgtgagcgggtccgacgtcagcatttgagctgcgtcgacggagcttgccgatcttcatgtgaaaagacttcgaatgtttaaggctatcgagacttatgatcgccggtccgaagtgaaactctacttgatattactcggcttggcagttctacgtgcactatgggcctacggggtgcgggtcgcattgtctcggatccttttccgtgacacattgtgagtaacctttggctcggctaatacggtagaagcgggagcagactcgagggcgagatggcacgaacccctacgtatctccgtttctccggacccgacggttcgtgcagcggcaccggaaatcaccgagagcggccgctgcaacaacccgtcggcgaagcttacgaccgaggccatgcttaatgcttgcttgcttggcgaagctattgaaagtccatgatctgtggaggaaacccgatcagtctcgtgagaccagagaaatctagacaatactatcgcaggaacgtagacgtacatcggcgatagcgtagggtagtgacgcagataccctgattatgtcgtgctcagcaagctctcgactccaccgcctcgatgtcagcatctgatcttcctgactcacttccttagagtggaccacctcgagcagagcctccggtctcggcgtatcttacctttgccgtttcttgcttgctgcagaagaagctgaatccagagcccttttccggcctggaagcggcgcaagagcaacctgtcaaacaaagcttccccagggagagcctagatacttgatctctgatcaccgcgctgagacaatagattctctacctgttcgtccggtcagcgtcgtctcactgcaggtgtagctggtttatgcacgagccagacactcaaaacaatcctggctaatcttcaatcctgaccctgacccacgagagagactcgacgagacaaaagtcacattatcccaacgtcagaagtcacttcgactagcttgagcatgagcttgggtgtcagcggacatcgagaaacgcggacatcaggtaaaaacacgaacacacggccatcgtaaagaggcggacttggagatgggttaccctcaagctgtcgttgctcgacttagcaatcgattacacccgagtcacgaagactgaatgaaggacaggctctaaaatctgagatcccattagtgtcggtgtctcgttgttaatggttgcgaatcaaaacgagctccgttatccctctcggaccaggagctcattcgtaccgcttcgcagcaaaccttctgcttctttggacccttcggcagaaaaagctctgtttgccaagatccgatcgctctccgcccagcgtgaggatggcacaccgtcaacaaccacgatttatatatcacatcgattctcaactggtgggtgaccacgtttgtcaacttcataccccaccgagcttatgtctcggtcttggtactagtccgtaacgcagacaagatcgctgtagtggagaatggggtgagctctgaaactaagaggccgccaactccagtcgattgacgcttcttgcgcacgccagactatcatcgaacacggttcaatgtgccctgaaactcatcagacattaagctagatcggcgcatcaaatgttcgaccagtaaatgtcgacgcagcgggctgggccagagtgagcgaggccgtgagaatgaccagtttacacgcgcgcggatgtgatgatggtctaacgtgctgatcgatgtcctttgtttcggatcaagcacttcgctgactggggcaggaatttaccgaacacgatatactcctgcaggctagctcggtgacgcgctgattactccgatgacggtattgataacagcatccgtgatcccgaaaacgcgatcctccctgacccttgcccaggccggtcaacacagtgcggctgctgacttgcacgcgcgcgcgataacgatcgtgatgactcttacacgagcgatcggttcctctggcataggctactggggcacgtcatgctagacttgcctctgcaggggccgatacatctaaccctaaataccggtactttgctgactttcacgatgtcaccagcttcggatatacatgtgcttctgactgtttctcgaaatcacatcgcgatcgagaagcaagaaggaaaaaggatcgatcgctggatagcataggaacatatatacatcgaacctttcagggcgttccattcccctgaatgcgggttccattcccctgaatgcgggtgggtctacctttgggatatcacgagcacaattcaacggcgcaagatgcgcctccaatctatattgtcggtacttctagccatcgtcgttactatcgttcaagccaactcccaagccaatctatacaaacgagcacgggactggagatgcggccaaatcaagtcgaatgatgctgctttccccaatcaatgcatctgtttcgatgcacttggattgcagacggtagcaggggaaagcgtggcggtcgtcgcctactcgaatgccaggatgtttcggtaccctgcttcggtgaataacgtactgtcggccgacgttgaccaaatgctgagacgaggattattcgacttgacacacgtagaccagcaacaatggtaactgcgtagtcccggacggaggacctgtcaccctcaactcgtttacaacggaaaacaaatgctgctctttcagtgagtgcgcagatgcgacttgatattgaaatgtccgctgagcgccctgcgacctgcagcttgtgctcttgggctgtgcggaaccaggtgtctggatgttggtcaggtgtgcagatccggcatccctgtgtccgtacttaaacgtgatctcaagggcagctcgtgtcctgaaggtttgtctcatgctggcgacttttgagacatcctgctgagggttaggggttttttttctgtaggcctggcgagctgcttggctgccaaggttaacgggcggagtgtgttcgaatgcttggatccgaaccgaaatctcgagtcgtgtgagtcatgggtggaaactgcataataaagaatgcagtgcaacgactaatctccaggcgtacgatgcaggtggtggatgtacgttaccagatcctcgattcaacaattcgacgtctactggcacttttggcagagattgcagcgagatcgtgagtcatggcgttgtgacagcttgcgactgcgagactcattaaatatctgatgagcaggcccatgcgaccgatgtttcctgtcaagacggcatgtgcatcgtcaagagttgttccaaaggatatctggcggcaggcgaccgatgtatcaagtcgtcaagaatagcccacgaagcgcgaaaacggcggaattcacaccgataagtcgggtactaccggtacgaaacgaagactatgaaacagttgtaacagccaataactaaggccaacatagatgatcgcgcgttgaatcagcaattcagcgtcccgcttcgatgatacaagtggactgaaacgcttacgtcatgatcggggttgtcacgcgaatccggaaatcgatttggtgacgtgacagaggaagggagtaagcgttacatctcaaatcgccgttcggttctccctctcgcctgtcgagtccagcataacgacctcttttcatgtagattaccgttcttgcttaaccagctttcattgcggagtggctcattcaatgaaaacccgcaccccgcgatcgatactcaccccagatttcgaatatgctgtttgtccgatcaggagaatcttttggtcgggtccggtacacgggactcaggggaacttcgagtagacaaaggagcatggcccggcagcgtcattatctccatccatatactcgacaatggggatgactacagatggccaaacccatgagaacgggtcgcgaattctcgaggcatcacctgtgtaacgttgacagcgccggcgacaagaccccgacgatcgcgaccgtcttccacagacactatcaccacgatcgtcagcccgcgtctcatgaaaagtgacccgtctgtactcacgaaatgcggactcatggccattatcatcacccttagcatttccaactcattcgggtctaggaagtgctctcgcgactggtgcttgtcatgcttgtcaccgtgagtggttctgcatcaagattgcggtatgagcagcggtgactgacggtagaatggatgatgtcttttggcagcgattatcgtagggatctttgcagagggcacgagccctacattcgcaaccagatcgagggtcttgcgcatgagatcaaaagccaccggagcaggatgctacagtagagcttggcactttgtcgaagtagagacgtcaatcatggttgtctagttctacatgtcatttgagacagggactgagagcgggaacagagatggtcgcctctacgatcgctgcagctcagaatcgacctgcggcatgtaacctgtcatgttatatttgcagatatgaatgtcaggctgcggtcctgcggggtcccttcggcgaggattcccccaggcgacgttgcggatgatcggggtccagacttctaacatctatcgcaagaccttgactgtgtctatcgaggtactaacatacctaagacctctggggttcatctccaacacgtcactgaatgattatcaaaagatgactgcatgtacgatgtatgaatacgaatatcggcccgatgacgtggtagtgggtagtcgccttccgggtcgcgaaatggaagcctccaccatgataaggccagctgtacagctgtgttggctcggacaacttcaacaacctcaacattccgattctcgccttgttagtggtatttcgaccagatgtcgttaccatccgaccaggcaatacctcagccgaactcgtcggaagactcgatcaagtgcggactaaggacacgagccgctcgaacccggccggcacaaaggcaaaaaagggctcaaagggaccttgaggctagataaagggataccttgatcggccgcattgacgacatcccgatagctggaacgatataagactcgagtaaaaacgtcgtagaatgacgaaaaactggaccacattagctaagcattccaccatgcgtttgccgagggcatctcgaccaggctttccaatatggtcaccatcaccgcctcagatgtcgccatcagaccgagcggcatcactagcgacctgtccccttcgagaaagtgcttcctcatggcaattatagtgctccttgggatggtcaactctttcggaggtagtaccgtcctgatcggtcccaagatacaggatgacctgggcttttcgacggacgagttgcaatggttgagcacgagcttttatattcctctggtgcgtatccgcttagggtctatcaacgagtcctgtacgaagtcactagaagactgatgatgattcttgcttcaagggatgcttttcattgatgagcggcaagatagccgatctctatggcgggaaacgcacctgtgtcgtgggaatggtgttctttgtgttgccatctctgggagcttgctttgcgtcgaccaaagagacgcttttcctcacccgcggcatctcgggattggggagtgcattagctaccgttgccggctaccgtgagtcgtatcaagactccaccaccttccagcacagacattgacacagtctacgtatgtccgtctctagcgatcgtggtgggcatctttgtcgagggagccagtcgatcgctagcccaggccatctatgtagcggcgtggcctaccggaggagtcatctcgttgctggccatagggttcctcgctgagtttgtcgtgctctggaactgccaatgcccgaacattccacgctgactgggtctgttgatgacgtacagggcagattggcatcgatacttttacctcctcaccggactccttgcaggaaccacattggcaattatcctttttctaccagatatacctggtcaccgaagtccagagtcgagtctaggccgcgatatcgactgggtaggaggtttcctctcaatagctggtctggtactagtgttctacgtgctggctatggctccggcagcagcgagaggatggggaacgccctgtgagtcgttctacgcatacgactgattcgtctacgatgtcgacgactgattgtgtagaaacggccggcagacatcgctgtcctccttctcgttggtctcctgctactgttcttctttgtcgggtggcaatggcttctcgaacgtaggactcgaatcacccctctgtggattacgcctctcgttccactcggtgtcttcgctctggatcgcggccgagtatcgttcctctttcttgtggctgtaagttgcgctgctgcgtcagcgaaacgcgccctttcggctgacttgccctcctgtttcaaagattttgtgcttcgctgggtattctggttacatgtttctcatgacgttgtacctagaggtctatctagatcttcccctcaacaagacttctgtaagacgccaagcatctgttcgatgtcgatatggcctggtactaatgctcccaaacagctgcatttcgtacctggcaccatcgcgtgagtccctttcactggacgcgtccccttcaaacctcgagagctgatgcgagatcagcgttgaaagcgggataacatgcaatatctttatcggactgattgccaacaaggtatctgctcgatggatcctgatgacgggtgcaacagcaacaggtgtatccttgattctattcgcaacattaaagattgaggcgtccttttggacttatacactgtgggcaatggtaagtgggctgcgatactctacaattccctttcccttggcaccgaccacggttttcatgcctttctttagatcttatcggtgctaggtgctgaatgtggtgagtaattaccgacggctctcgtctgactccgctcattcgagactgcatctttgtagcgggctctgccgggatcatacacgttacacgcgagatgaagggatccagggctggcttagcgggtggtctgtacgggacgttcattcagctcggattttcactaggtccatccgtcgcgaccatcggattgagtaagtctttttgttgcaccacggcttcgatgtccgcatgctaatcgcaacacttctgtccttggataagggtacatcgccgaagccgacgctaatagacgggatccagcgtcgtccatgatcgcgtacgacgatcctgctttccggtcatcgagctatttctatggtttacaacgtgccgcatggatcttagggggaatgaccttgtttgatatgtgatcagtactagcgtgatacgctcgaaaaagaagactaaactatagacgtacaattacgtcgtgcatgctggacttcatttgaaacttcagctggtgcggcgatccccttcgtcatgcatcccacaacatccgtaaaagacaacacagcgagctccgtaggaagcgaacatgcgatcactaccggcgacgaccctatgcgacccgactggagcagagcgagtgatcttgaagcaaagcgtctagacgcagatgttcaacaggaacactgggacgcatttggatcaaagctataagccagtcaagcgaaagcgtacctgggtaggtggcgtcggcactttcgtctcagtcccggtggggaacgagcaatagtctctcagtgaagctgttatgtcgatcgatacgatgtatctttactgaaaagtgcaaagctccaccttgtacgatacattatatcacaaacgtagttttcacgttgtgtttgagtctttacctcgcccatatgacgcgacttgatctaggtttcaccccacaggctatcatgacaaccaagaaggtgctcgacgcaagagctgctcgctccagggagaagaacgcactcaaacgcaaggctttacagctagtccttcagccaacctcggaatacgatgtgcagcatcgtatactcaccatgcacggaactgtctacggcttcgacatgtctacggcttcgacttcccaggatatcaggatgttggagtgctccatagcaaggctgtccggcggatggccgactttgcaaaatcagtcaggggtcggaatcagcatgacacctcacgtacgctggtgcctggaccgataaaaccttggtccctcgggacatgatatgatatacatattctcgagccatgcaaagcaacgttgtcatcttggagccaatcggatcgaagacggcacaatgtgtttggtttgacaagcgaagaatggcaatgccgtagatttttgtgtttcctccttgtattgaggctcgaggcttgtatatgcgcttgcgtacgtctgtcaatatcttaccttttgctcgatggaagactgcacaaaacgcccacttcgttaacgtagatagcaacttcaacaacagtgaaaacaaaacttgccagattcccggcgttcatgggcagtactttttccaagggtcccctctcgtcacctcggggaacttgtactggaacacgtcacggggcgggaattgacactgctacgaccgtctcagctgagacagtgcttcggttgtttagcttccctccacctgcaccaaatcggtttggccaacggagttacccctgcagaggtctagggcttgcggcaactgcgaattggccggacgggttcgacgggtttttctagttcgagttaggagataaaacccccattaacgagcacactcgatctcacccttatcagaaccggtcacttaaacatccatcgctgggacgattcggggggtttagcaagcggtggcaaggttgatggcaacaaggggaaagacttggcaggacatgggttttacagtaatatgcatgctcggcaactaccttcctacatcctctctttcaaattcgtaacatcactcactgagcggtcaaatagctgggtcaattcttgtcgatatgaggagggtcgggtcagaagcagctatagttgttgcagtgagccgacttagcgcgaccacgggtgcacatctgaaatcagacgcaaaggcaatgagcggactgggctcactaaaaatcggacggtgatgtcaagcgcattatatcacatgcggacaccttattttcacgtcgacttccccaaatgtctcctttggggtccgaactttaagaaccttggtatgtgggggacggaaccaaccggcggcagtccgattgaagacggctggtgttgtcgaggctgtataagaagacaggacattgtttggatcgatactgcatttcgcacctagccaagctaaacgatcgtggttcagtatatttgtgaccggtttgtgacaagcatcaacccattcgactcaatcgatcgtttcgacccaaaaacatctgccgtcagccgaactgtccaacctgatttctagaaagcaacagccacagagccgaaggcgagctcttccgcttgtttgggtggcaacgtttcctctatttttgctgctatagctattgggtatagctgagcttggcctgacgatagtgcgttgcacgaatccagcacatgtcggactttgcaatgtcgacgagcggagaatctcaaggggtatagttgaactcaaaggctcttgtaacataatgtctcgctgtctatcccacagacaggtcgcaaagacttacgcaaaagccgagttcctaaacatttcaaaaccgagctcagccgaaaggatatcttgtctgtctttaatatccgctagtcgctgtccacgcgggtgatggctacccaaaggtcgagattggattccagattgccttcaccatacagcagtttcagtctaacgctatcggcaacctgagtgcaggatggaggcgaatctcgtaagcgctcgcgcctgtagaacccaacactcgcggaaacttgccctttccaaccgcctcgacaaagggccacctagtacccgcgccgtaccgcttgactttggtcggcggtactaagaccggcagacggcatcccttccgacgtcatcaatctgaacaggcgacgagcgtttcgatgctgagacgggtttgggtgatgtgtgcacgtgggtgaaagtgcgttaaggtgaagtcgggtgaagtcattgtcgtaaaaatgtgatcgcaagaatgggggcagagtgacaggcctgaagcgggaagtcagagggctaccgcggtcttgcccagtctgacattatccgccagcaggaatcccctgtgccctaggccgcatttgcgatcgcacatctgccacgcagccgcactcgctaatcagtacggaggccacgaaggctcgattggcaagacgaccagcctgctcatcaattgccagatcttcgcgactgcatagacctgaaggtaatcgagaaagtcgggtaaagatcagcttcatccagggtggaacctggattccgaggaaaattctcacctgaatacgttgcaacggagtcttcatgtgctctaaccatggattgccgagatcttgttcattacaggagttcctcagcatttcattgcgaaatgcgtatggtaaaacctcgtttgcaccttcgagggtgttgatgcaaccagattgagcggtcaatctgtaccacctgttcgagtctttgaaagaggtgggctgctgttcatcagtggctgttcgtcgagcgacagggcgttcgagaattcgttgatcagcggcttcagaccgctgctggaatcgacgttccgccgacaggcttggtaggcacctttgtctgaaaatgtcatcagcggtggtatctcgtctgctgagtcatcctcagccatgttgtcgccctcggcaagccccatggatccggtatctgcggactcgcaccggttgaggaacggatcgggagcctcatccatcgttattgccggtcgtgttgactgagaggatcttgcaagggtgcgtgcggtgtctgggcgctggcgctcgaagacgttttgctcactcaaaaggatcgaccggctcatcattgtcttcgccgaatgatctttcatgtccacgtatcatcggcgactctcggtgcccctgagaattcgatggaggtttcgcatggcgtagcaatcttgggaagggccgacctgatacggggagccagagacacagtcgaaggcgtgaccagcgataggggtttctatctcgcagagcgaggctcgaagggcaaggtgaggctcagcgggcaatgccatgaaacagatctgaggggacaggctttgccggcgaatcccatttagcgacgcgttaggaatcttgacgagcgcctctgcgatatgcctgtgaccgcggggatttgaggccgtcgcttgtgaatcacatttcttgagtatgctttcggtcaatccccgccgatctcccggctcttcaggtggaacttgcacgtcgataggggcgtaagggcaagggaaacctagagtatcaatttagcattcggaattcagctgggacaactcaagtccatgcgagaccgatgctaaatcgacttatacccgtaacgcgcctatggtggcgccccggtccgcccattctcgtcgtcgtggaccatcttgacgaatctcatgtattctttcattttgtccgtgatggtcattgcggcggcgtcgacgaggcccttagtccaaacttggatgtaccgggagtcgcaatggtcgatctacggagaaattaggattcagagagtagggtcagtcggcgaagtcacatacgatccgagaactaacgatgcgacaagcaccttatgtctgtcccagcgatatcgcaggtcgtcccccgcctagccgggagtccgtcgagcagcatgtcctcatggtaggccatcgtggtactgaccctgtcaacccgaagctggaacaagacgggccaagtcaacgtcaaccagctgtgtgaagactcgtcgagaaacgtctgctcacgtatgactacccggatctagctgcctcgaccggtcttcttctctttctcccctctccgcacttgcgtcccgtcggctcgtcgtctttccatgatcatccttgctcgctggcgtcttcttgatcgtcaccacacgttgaagcgaagcgaggactccaattgctgctctccactccggattcacagagccaaggcgggcgggctgtccggccccatctcgcccgtgtcactacgagctacgagctacgagctaccagattacctacctaatctgattccgagactaaaggggagtcgtgtcgatatcgccgcccttttcggttccgagaagagcttccgagtcgagtcagtcgcgagcttaggtaggtgggttacgtgcattagtcctcgaccgcaaggggggtacgcaagcttaggtaggggggttacgcgtgacctcgactgtttgggtacccccctactttcgatggctaagggggtaccaacgctaaggtagggggcttaccgacgatcgactaaccctgccaaacccgatcgttcgtcagtaacccccttaccttggcttgcgatatgggcttaacaacgacggcaagggtaggacgaaacgttgagaggagcgcttactgacgaaagcaagggtactaccgagcgtccagagggggcttaccgtgaggcagtgacgaactcaaggcggccagttcgtcgttttgtcacgcaagcccaccaccgaagctgcgatacgactttgctaattgatcgacgggcagcctcgtcgaaaaactcgaaactttccttcagctacagtgctcatccagctctagcacacttcgcggccgtttgtcaaacacgtggattgaaccggaagatccaggacgatactcggcgagaatagaagacaacgtattttgactaatatgcaacgtctctactgtttccgatctgttctcatgggcggctttatacagcaagctactgatcggacagtcatgaccgcaaggtactatgcgagccccgaaagttacgttcttcgaccgcggtgaatcgatcgtagtctacttagggatgctgctggagatagtcatcaagcgacgctcgacctcgtggttgggtaaaatgcctttataggtttcgagagacaagctggagggtatgagtgcaatcctgcgggaggtggcgatcgttgggttcggcaagaaggagtgctcgaccgcgctgaggacaacgaaagtaatctccattatccctggaggcggcgtgtcaagatacgaaggcggcccggatgagagaggggcgcgtgaaagggtgttcgcagatcggagcaattgccatcggaaacgtgctctcagagtcacaacccagggacacaatctctcatatgtggtatatgctgacacagatcgaactcaaaagaggtcgatgtggggaaggtttcccgttcggctaccacaccaattaattccgatcagatgacgggccacatcgtaacactgcttacacccggtcgactcttaatccctccatcgactcgtccccccgcccatcaggacggcaagacgattgccagaccgagcactccagtaattgtacaaggagggagtccggtttttaaggcggtcgtttgggcttcgaagggggtcaaccaggtcgattctcggcgtgggaacgtgggtgagtgcagcggcgtagagtgccaaacaggtcgaacaacgattatcgacgagcgagacgtaggtatattggagtggaccttgccgatgaggtcctagtccctcgagttgtgatttcggcggtgaaagcgctttttcacgcgtcgatcgaaacacgttgcgatctgtttcgacgtttttgacaactgaaacaatcgaacccttccgtttagatctggtcaggagctaaccctgaacgtcctgcggcgtttcgactacgattacacccctttctgcccctttccacgacaatgaaaggagccctcgaccggtcgtagcatacaagtatcgccaccgcgaagcgtgccaactagatcgacgcccgcgaataacctatcgaggaccagagacgagtctgcaccatggacaccgtttcgaaactcaaatcaatcttgaaaaagacctcgaaatacgatcgcacagagcattcccatgttgcgaaactggcgtcctttttgaagcccacgcaggaagaggacgacgacgaggacgtggaaaccgagcctcataccccgaagatcatcgacaagttgaccccgggtgtctcgccggccgtcgattgttttaccgagcctcccggcactccaccacctgatttgccagtagaggaccacccggagcttttcaattatcatgaccaggtcgtcacccgttcggccatggaattgctcgagatggaagacgagattgcggcccgcggcggtctttttgaaagggatggcgttatcatgacggcgagcgcgttgtctctgttacaggcacaagaggccatagccctagctgataccgctggtcaaggcgaatggggccgtaagtgtcgtgctatgccagcggttggtactgacgttgctgatggggtccgttcatcgcctagccgacgagtgggatggtattcggtaagtttctagcccggtacgacgtgccaatcatgctgacgcgatctctgagacagcggtcagtatatcccgaagtgggcaagtgtcgtccctgtccgctcgttcatcgttcccagctgacctgtctccgattgcaggccaaaaaactcacggaggccgatcgatggcccttggccaacgacgacggcaagcctttacgagcgagtccatggcgtgttttctgtgtcgtctgcctgctgacctcacttgccactggtagaacgaagatggaacccgtcaagaagattggttcgaggctgacatggatcggatcgaggagcgcgacctgttgcgtttcggtatggagggagttgtcgattacaactactagatagcgcagtgttgtttgcgtaggtctggccgtcagtccactttgtcgaccgaggtcatgtacaacaaccaagtcttcaaatatcgcactacgaccggcgagctcctagtcaatcatcccgaacaagagatcccccctcccaacaccgtctacggccacgtccctggggtcccggtcggcaggacctgggattgcagataccacatcagctctcgtatgcacgacggcgggctaccagtcagggcaatgtaagaccagcccgccgcctcgctctgcatacacagcgtctctaacggtgacaatggaccatggcgagactctctcgacaagggaaatcgtttgacctttgtctcggcgtacggcaactatggctttggatattcgtctcgaacgggacaggcgaaggatcagtcattctcgcatgccattcataaggctctgttgcagaatgtcaagacggggatcgagatcagggtgatcgggggtcgaagacgacgaccgtctggacgccggaatacggtgagcttgggtcagagggcttgtatcgttgacgtattactgataacatgaagattcgcttctcgcttgctatcactcaccacgctcttatgcctgcattccgtccctccctccgacccgtcttaccacgttctctcgtgaattcaactctacatccatgacatccacgtcccgactttcacacgcttcgcgccacactttcgccatcgatctcatcggcgtttcgacgacattccgaattcgcgaccgaatccaggcttccgatacgacggtctctacaaagtcaactcggctcgatccgtcatctctccagtcagcggcatgaaaatgtgcactttcgatctatgtcggctccggggacaaggggtgatcccgcagctcacttcaacgagcgggcggatcggaatcgaacagcgatccagacaactactcctcaacagctggctcgacgcgattggtcgtccttatccctcgtcgaaatcaggctcccgtgtccaatttcgcttcgggatcaagcagccacgacgaggtcgtagcgcgaccaagatgcatgaccaatagcaggaggggaaggctcagggcgtgagggcaaacaatgtttggaacaagatatggtgctctttgaccagagtgcctcggaatcatgcgttccgatccagcccgctcgagtccttttccctggttcgatatctccaaggtcggtccgctagtatagtgcatactagtattattggcgcccgcccggccaaagtgtaattacaacccaggaatcctcatctcatgtcatcgcagatatttccgtcgcatgacatgatcgaagtttggtgctctgtccttcgaaacaaggtgggcacaggcgggtccaacaagcgatgacagcgaccgaaatccctgtctcactctttgccaaagaacttgatcgggtacttactggcgtggaaatcgctagaatgtagagacatattcaggcggcgcggcgccgttgagcgactgaatatttctgaactttggtcaggggtaagtaaaccattcgctgttgttgtcgcggtcgtcattcgacgttcgacataagaacggcaggcatcggttgatcacaatcctacaagtgggtctagctacagatgactcgacggtcctagccaagtggacgcgtagtcacatgacaacgtgggcggtcatcaccatttacgcgccactagtaacgtccgtctcgtccacaggaggatgttttggatctgacaaggacgaatggatttgtcgatttgaccttgacgattgacggactagcgtgtcgaaccttgaaggtgtgggggtttggaactggtcgatgcaagacgatcgcagccgggatgaggacaccgctcgaccatctcgacctcgggcgagtgcgctcgggtacaagaattgtccgattgagtccaaccgagccttctgcagaggcagggacgcgtacggcttctcattcgcaagttggggcccagccggttcgagggtatatgcctacttttgtacatctctgcattcgataaatgatggtcttttagttacctttcaactcagcgtcggtgattatctggtacaatcttgcgaccttgactcaaggctgattctcgagaacgatacgacgggtgttggcaacgcgaaaatcgctgtccattcccttgaaaggctagctgtgagccagattaacaataggttacgatcaatccgagacgctacagctaccatgttgtacgaagatttacggctatacaaaattaccgaggacttttgcccgctcgaacttctcaatcctcacgactgatacctttcgtccggagggaatatccggatagtctactctgtcgcgagacccactctgactacgcccggtccgagattcgtaacaggaggagactgagcagaacacccagtgcggccagtcctatcccaacgtagtgagcgccacgataggcttcaagtatcgaaccattccggcggataaggctctcggccaagcttcccatgcccagtccgatggagatactgtagttgatcatggtattcactaaggaagcgccgagtccttgcttgtcgcgaggcataaagtcggatgcagcaagattcgctgcgggaaaagagcagtccatcccgaaaggagcgatcgagaccccgatgaacgatgctgcccagtaagtcagatccggtggcgttacacaagctatgacattagacagacaaaaggcaatcatcgatccgaggaggatgtatcccggttttgtcctagacatcagatagcctgcaatcagcgcagctgctgtcccagatacggcaattggagacatctgggccgtagcccgaagaggagtatcatctctcaggacagcccaagactgccacaaatagtctgggacatgcattagggatgccgttagtttgtcatccagaaccaagatcttttcccaaacggcgtctcacagatccagataccgaaagaactccagcctgctccgactgcggccaagataagcacaatccgtggactcagatcgctcaggggtactagaggataggacgctttcttctctgtccagactatgtggagaggtggaaagcgccatgagcatagatcctgcatgatatcaccgtgggggcacttacaaaacagtcccgttgacaacagaccgagcaagaaggtaagatacacgtagaatgttttccagcctaccacggctccttgattccaggcaaaattgatcaagaccaggccagtgacaccggttaagcaaccttgcacatccaaacatcccttttgggaccgcaagtcgttgtcttcgtcgatggttggaggtatgacgaaccagcttaggcttccgctgatcaggcaaacgatagagtgtacccagtatatccaaggccaccacgacctctgtccgatcaggctcgaaaaggtcgctcccaatatgaagcccaacggtgccgccagcccaaaaatgctgaaggcaacgtctttccctcttccgagagggtagatcctgccaagaagggccactccgtttggaagtaaaaaagcgggaccgatcccttgaagagctcgcatgacatcgaagtatatgtggccataatattggacgtagactgataatcctgttcagtgattagtacaaaaagcactcataagttccacgaacaacaccgaccagtctgcacggtccccaggcatcaaacgtaccggctagcaaaccacatatcgagaaccaaagccatcctcctagaacagctttccgatgaccatatatatctccaattcggccagcgacgagaatgaaggtgccaacagtcaggctatatgctgccggcgaccagctcatcaacccagggtcatgatcgattccgaagtgtcgaccaataatatgtagaggggcgatcgacatcccgagcgcgctttgggtgagcaaatgacataacgatatgacgaagaccagtgtgacttccgacagaaaggatatactatctattggccagacaagactatccgccggatcgatagcgggtagtgggtttgcagcttcgaggcccattctccagctggtcgcagtaatacacctgccgagattttagccagcagatgtttccactagaacgggttgaccaggcactggaccagaagccgaagctcacgagtcaaaagcgcaagcatgatctcctattcttatcgacccatgctgacccgtaaaaaaggcgactggaccgcttgctagcagaaccctgctttctaggccttcgaaacatcggcaacgaaacttcccgatatcgcgccgtgctattcgtccgaccgcccggtaatcacgtggtctgtgctgtcgccaccgaacgccgggagtgctgcgactttgcacgatgcgctctataaccttccgggtatctctgagcaatgtcgatatatagatatctgaacactgtagtcttgttttggagtttgtgctgtctcaaagtcaccgaagttggttctctagctgtcgaacacagccgttcgacaatgtctcaaccaaaactcaacgtagcggtgataggcctcggacgcatgggcaaacggcatgctcgcaacgtcagaaccaaatagtccgtatggcgctctgaaaaccctccattgatatgcatctgctttcaatctttaggtcgcatatgctacgcgtaatgcaatacttgttgcggtctgtgacacttcggccactatgattcgggaggccatgaaagatctacctgcagatgtcaagtgagttcaaaatatcatcgagatggagtgcgacttgtatgatgacgttgctgtgactgaccgtgttcgatgcaaaacagaacgtttgtggatccagacgaaatgttacgcgagagtcccatcgacgctgtcgtagtagcgaccgatactgcttcacatgcgagcctggtagtaaaagctctggagagcggtgcagtaagttaccgacacatcggaggagagtattgccgctttgataggactgagagtctcattctgtcactccaagcacgtcctggtggaaaaacctgtctcgatcgatttggaagagacgcttccggttcttgaagttgcagcaaagcggcctggacagaaggtgctagttggattttcacgtcgttgtgagtttgtgggtacttccgcgcgttcgatgcgaaatttcagactggtggcgatgtatctatcagatgatcagtcgtaccagtcggcaaaacaaaggtttgaccggggagatttggggaaggcttatcttataaagtctgcaacaaacgatatgtacgacgcttctggtaagtgccataaacaatgttttgtcggcgctgtcgccagccctgctgaacaatcgtcatcttaatacaggattctttatcgcttattccagacaatccggtggcatctatctagactgtgggattcacgatatagacatcgctcgctggttcttgaacgttaccgaagcaggcaaaaaacaggtcacgcgcgtgtatgcgtccggtgtcaatgtccggcacccagagcttgcaaagtttggggatgctgataacgcacttggtactgtggaatttgcaaatggtaccatgtgcaccttccacttgagtcgtacggcgaatcacggccacgattgtttcactgagatctttggcggaaacgggaagatcgtggtgaacggagtgagtcggcttcccatcaatcagaggtgcattgaggaactcatacgatgacggcttcgaaaagaatccttcgatcgatagagtggagatccgagacgagttcggagtccgtacgctatctacgtaggttccagtatatgtggcttgcgagaactgaacaccgatcgaccgataaacattgggatacctgtgcgattgcagcgcgacatactatgagaggtttcgcgaggcctttgttacagaaatgaatacgtttgtcgattgttgtctcttcaattcgggtcagttcagaaccagacaacactactccatctttgcggctaaaagtataaatcgtctcctcatagcggtgccttcgactctgcaagacggtctggaagccgccaagatcgcgatagctctgacacattccttcagaagcggtcaacccgtggcatttgacgatcagggtgaagcaattctggagtgaacagcgtagtctgtaccttgtatggtataatgcttggtagtgcccatcttagcgttctctcggacctgttcatcaaggtctctcggtattgatatatcagaccagcaactccgtgttcgttttcgtatgcataggagcctgggcgttgcaccagatcgagcctccatcgccagtgatgtcacgttatcagaatcgacggtgaactgagtcgccaggatcgatggttccaggtcggtccggtaatcaaatgaccatcggtctacatcatgtggcgttggaccgagaaaacgagcgagaatctttccctgccatccgtgaacggctttccgaccatcccggtattcatccgagtcgttggataaagaggctctctgacgctctctgtcatctcatggcccaatgcacccttcttcagtcgaacaggttccaacgtctagaccgatctgcatcgcttcatgatgaaggtttcggcggtgcgcggacaagcacttcaagctgcatcgcgtcttgtccgtcgttcgagatcaatctcagagctagatggaccactttcaccttccgctgttgccgatttcaagcgtctgtgtaagtcaaagctcgccgacctataagatggtcgtacacatcctgatgcgcatcctgatcttcttgcataggcaaccaaacaacagagatatccgaattcccttcagccaaagtcatcgaatcgagagttcctatttacgaagccgcgaccttgattcggaaagttcatcaggatgaagatgggcgcgagcaggtgatggacgaactctatcgttgcttgggcgatggacctggagtctacgtggttcggaattgcctttccgatcatgcgttgctcgatagagttgacaaggtgtttgacgcgatcatatcgagtgagcgggacagcttcaaagcggaccactttgctccaggaggcaagaacgaccgtatatggaactcgtttcagaagcacggtgctctggatcctgcttcttttgtagagtactactcaaatgagattctgtgagtcacgctagatcactatctgcgcgtggaactaaaaaagtttccttgttaacgatcagagctttggcgtcggaagcttggctcggtccaggtttccagatgacagctcaggttaacagagtcaaacccggtggcaaagcccaaaaaccacatcgcgattatcgtgggtagtccagcgatccggcgacaatgtcacgtgtactgactcttgatcaacacttatcattagatctgggttttcaatcagaaggtgttgcccatcaattcccaatcccgaatcagatagcatcgcaattcttgacattgcagggtgcggtagcgcacacggatatgccgatcacaagcggtcccacattgctcctcccatactcgcagcacttcgagtatggctatatggcttatcggcgaccagagttccaagagatctttcaccgttcgtctgtacagctggagctgaaacgaggagacgggctgttcttcaacccagccttgtttcatgccgccggagacaataggacgaaaagccaccaaaggaccgctaatctcttacaggtctctgccggctgggggaagactatggagcacgttgacaggagcaagttgttactctgtacttggccccacatccgtcacttgctagaaagcgagggaggtgtagtaaagtcccccagagttcaagccgtggtcaaggcgattgcggacggatattctttcccgaccaacctggacaatgatccgccacctgcctcaggagtgagtctgaccgaatctttgccactattcgctttccactgaactcgatccattcgattccgcgggaatttccagcattgccctgacacgcaacaggacttgatatttaccgccctacaagagcagtggtcactaagccgattggagcacgaaatctcggccaatgatgcgaaacgacgcagcgattagcttgactatccctgtcgtaaagctggagtaccactgatcatgtcgtgtcgaatatgaacggctggtttcgttttatttgtataaatctgtaacccgacttgtgaaatgggttctcgtcgggccatcttggttcggacgaaagggatcgatctgattcgttgtcgcagagagaaaggtgacgtaagggtgatttcggccgccatatccagtagccgggttgcgatccgtatggtgtcgattgctcaattgttcaccagatgattgatgcctgttgagcacaagctgggagcctcaaccagatgcaaacttgtcgctttctagcaagcactcaacatgccttccatcgcacacaaatgacccgtgatactaggcgagcacaaccggatggtcgcgtccgattcatcttcgccagtgcttcctcgacttagctcgcataacggacttgattgtagatcagcgttgccggatatcagtccctaataattgagttgatgacgaccaggatcatgtatagcccgtcatcagcgtttaccaaggcgtgcgataggtgtcgagatcgcaaggtgagccgcgagtccatcaagcaagctcgtcgcagtaacgaaattgtgtgcttatctgcggacttgccattcgcccgttagacaaaatgtattcccagcgaagagccttctcggaagtgcaaagtgtgctataacctcgatattgattgtacaaggacgcatcgaccgagacggtcggggcctcggacctcgtgagtaaaatgattagaaagcctcttgatgagctgactttgatgagaccgcttggcgatacgtactagacgtgagaaaaatctaacattgggtcgaccaggacaatctggcattgcctcctcgacaatcttcgctcctgctgtcgatccttgcagcgtacctcacgatggaaactcttcacatcgcacctgtacaagagaatctggacatgatcattccggtttcgagtcaccgtctgaacgacgggatcttaatcttccatcgcgaaatagatcggaaagagggatgacgacggatgcttcagacagctttctcaaccattttgaaatcgagaatccctacgtcctgctggcccgaggtcggatctctgcgccacctacggtccccacgggagacgatactcagataagagacagtgcttctatgtcaaatcgaaattcgcatcacatgcaggatactggagaattgggcgcaacgacgagagacaggagtgacttaacctcaacaggtttgactgcgaacacttaccgcatacaggattttggcagcagaacatcccagacgctccccatgccaggggatgcacctgtcgccacatcctcagcaaattctattcttcacaaacaagcatcgtggctaagtactggtcaggactttcctcagatagaaacgctcatggattggcaaaccgtcaacttcttcctttccctctacatcaagcaccagcatcatctcatgccgctcgttcacaagccaacctttgcccaagacgtattagcacgaagagatcgtcaagacgaggtgtttcgtgcgttgattctttctctcggtacgttggctgacttcttagtcaccgaagcgctatgcctgatctccggtcttttgtctgtcaaaagtggcttatgtcatctgccagttaccaaaagtcgagatgagtggggaatttactcaagcagaactcgagaagttcgcgacgacgagtcatgatgcgagtcggagcatcagttcttcgcatttgagccgtccgtcgctcccattgttagtcagtgtgatagcgtgagtccccgtgtttctagatgttagcaatcatcgagattctcacctgcccgttctggagaccttcatagcaatcactattattgcaagacgagtcttggaatcgaaataagccgcgtgacgttggcacaggctactggactagcacaaaccttggcgaccgatggcgttcttctaggagaccataccgacgaaatcacaagagaactcttgcgacgaacgttctggcatctgtttaacatggacaagtgagtaactcacactgtcatcgagcctgttcgcaccttgagctggaaatgtgaccggatctttttcgtctccaggacagaagccgtctgcggtgaaaacatgctgctcgccaacatcgatcagttgccaccctaccccctcgagatcgacgacgaatatttgacgtcacaaggtcacttcccccaacctgaagactccccgtcatacatgactggatttgtcatcaacacaaagctgttcaatacgctggctgagtgcctcttccgaaatcgaaatgtcgctttcatgttacgagctggagtcagtcaggaggttctcggtgattgggtcaggcagcagcgaggtgttctaccacggaccttgcaacagctccctctgacatggactacgcggcccacaagacccgacgcgaaagatgatctctttgcgacccagtatgccaatattgtcgtcacagctgtcaccttggagctcgctctggtaagtctagggcttgctctcttcacagtctcgggctgaaaccctgacatgaacggaatctttgaatatctcagatcgatctgctggccgttctcgacccctcgttcgcccaagagccagaaagacagaaaatctcagagtccgcatttgaactgctatcaaggtaagcggatttagtcttcactatctgggactatagacagacgatctgatatctcccgcgtatgatcacagctgtcaatatcggcacctaggacaaagtggcgaaagcatggtcagtgccaaatgatcctcggtggcatgcgttcctagaggctgaaaccaatctctcacctctcagcgaagcaaaatctttcacattctgctctccgtggcttcgggatcgccagggatatcgagtgcgaaaggcggattccaggactggtggaatatcgtgagtcatggctgtctcggccccagacgtccttccgatgctgagctgtgactccctttacagtactcacagattcaatgggtccagatggcggctttgaactcaacgacaacttttcagcctagcggtgaacttttatcagagcttgatgacagagctacggccattgaatgagctgcgttcgacctcgcatctgtggtcagtagcatgaatgagcgctgcacggcttccgtgcggttcgacaaattcttgattgagtattgcatatcgaaatcaaggtatgcagatcggtcttacgagtcgaggacgcatcttgaacaaaggctctgcttaaaattgcgcagaaccctcgaacactgcttgaggatgatgttcgcaccaattttcagactgccaagctcgtctgccattcttgtctttagctccaggatacgagggtcggggctaagatcgtacgcctgactcagcaagcaaggtcggggcaggttatggaactgatcgaatcccataatcatggaaacgtattctcgccaatattgatggcagctcgagaaaccgtaatgcccttgataaatcgcgataagtcggagtcgagacctcattcagacaatggcctgaatcggacacagcctcaagccagtgtggaatggggccactgatgccgataccggcatcgcttacaagccagaagctgcgatcgacggattgatgggtggccggaaatgaaaaggacgatatcatatggcgaatcaaattgtcaacaggacctcaatattggggttgttgatgacagtcgccaacgaccacaccagcagccatggcgacaaggatgatcgcgaaaggcgcacggttctcctgatccttccggctagcccggcttgagacgaaatggcacgcttcagtcagtgtgaggtgaacttgaacctgcaaaccttgcaaaccgtagtatggatggaaagacagcttgaaatggagcgtatcaggacatttcgagaggatcgagaggcagatgtggtggaaccccagatacagacgctgtttgagctcatttgcaaaacctcccaggcactgtcctctgtgggtgtcttcggacccgcgctactaagtgttgtatcagttctcgactcttatcacctgctgaaggaaacaacgagcttcttgccggagacctttccggactagccaaagggcgaggtccagcgctcagtttgacccccaatggattctacagtctcgaccaacttagtctcacctgacccaaaccgacctcgactgccgcaatcccgccagtcctaaaatcaattgggttgagttccagtccacttgccctgtgacagtgcgagacttgtgagacgtaccaattaattcggcccatgattcaattctggttgaatcaggccatcggactgagctatatatacaaatggctacaaagggtggtattgagtagatatgagtgagtcgtcaaagtagtatgatgaaaggcagcttattgtagctgtccacgtcgcatcgtgtccagtcaaagtcatgtcaatcgtccagaaaaaatcaggtcatgtttacaggtgctcacctgacttgccagagataatcccgcagagaacaggatgtcaatacgtctatctctgtttactttgtctgtctcgcttatctgtccctgtttactttgtctattgcgcgcgggtcagtgcgctgcttcagcagagcaaacccgtctcgacccatctcaggagattagagacacacacaaaatactacgctgctacagcggggcataggggcatatatataggcttggaatcgtgtcgcaaccgctgtcgattgattgggacggcttgtggcctacaggatggtgggttaacttgtctgcatactttgccaaacattggtgtcctcaatctgaacgagagattgaattataaattctccaaagggacccgaattgacacacaaaccacatggaccatgctgataaaggccaacatggaataaggtctagaatatgggaatctgctaaaatgcaaaatacttgagctcaagcgcctcgtcttgacggcggggcggcacccacagtcgaccttgaccacgcggcaagttcggttgggcctcaaacgcgcactagcccgctcaacacgctcgacgactcgctgcgcgctaaataccgcgcccggcctgtttcttatctacgacgacatgtagatgacgaacacggcggcgtcacggcgccgtctcgccgccgagcgaaatgcctcggcgatgacgacaaagacctcggcgaatactcgaagaaccggacaaccggttcgacgtcatcccgcttctttacggctgcgctagacgtcttgcggggcgttgatgagacacttctcgcgggtccgttccaacaacaacatgatctgcacgtctcgtcacctgacgatgtacggctccgagcgcgttcctcgagtctaaatccgcgctagtcgggcaaatgataatgcgggacgacatcgtgcatcatgtaatttccccgaaacgcatcgaaagttgctatctttggtcacgtctgggtgaaaccactactagcgtgcgtatacgtgccttgcgccagtatgtcatggccccacaacaactccaacgcgctagccactgctcacttacagtcgagcagaactgccaagtcgtccatccggagcgcatgatcacgatgaaacagctcgatgcacctgaccattggagctcagtcgtgggcactagcggtgccgaacgtcctccgcgatacgtctataaatagaacggacgatactcaactcaagcatatatatggggtctcgaaaccaatcctttccgatgaacacggtgttcttggtgtgacaactcgaacaatcctgacaccagccactcgacccgcactcgctcttggtacctcgatctcgagcgctttacctaccgtatgaataagtggttcaaactctttgtcgccgcgctcatcatcatctcggccggcatccaagctaaacaattcgattacggtcacatcgccgtacccatcgtgaccatcgtcctccaactcgtcatccttatcctcctcgtcggcaatgaaattcaccagtcgaaccgtgacggcgttggctctcttcccgctcctggcggtgggcgtagctattaagcgcaactggctgcagaacgtcctggtctggggattcggaaactttatcggaggagtcggaggcatcatcaataactgcggtagtgacggcggggcgtcttccggtactcgaggagcttgtgcgtggaatgccatcctcgccactgttggagccttgtcgggtatcggcctcggctacgggaaacattacaacaagtttgacagacgagagttttacgacggttcgttgagggccatcctcaattctaccggtcacgacattgatctgaaggactttgccgaaaacgtctggggaaagagacacggccacgttcactacattcactttacccgcggtggcatcgaccactcggtcacgtatcgatccccggtctctggacgcaaacatgcgattcattcggcgatcggcggctctggcttgggcaaacgggacgtcacgggagcgtgctattcctacgatgactatggcggctcgtccgaatggatgtctgagcgggactcgtcgcaggacgccactgtcgccaacgacatctacgatacgctcagtaacaacaacgccgacgcctgctgtcttcagatcaacgacgtcttgaacaccgactttgtgacgggacgtttcgaattcaccgacgaaggtacctgtggttcgctctcggacgactgccaggagaacggcggcggatccgacaccaccgagtttgatgacgtctaatcggcattgcgtcttcggctcaatccgtacttttgaactgcgttgatgtgatgtgctctgttgagcttaaagatgtatctctaaaccaagcgaaagaaactgaaatggcaaggaaagcaagcccgaaaccaaagtcgttgaatgtataatagaaaaaggaaacgatgatgaatcgaaatgtgcaaaggctacattagcgtgccgcgcccacatccgattgcgagtcgcgaggcggtggattgggtctcagtacgacggctctttgctccggcatagggtcttcacatcatatcacgttcacagcctcgctcaatgctcgcctctttgcgagtctcacttctcactgtcgagctccttgcggagagccgccacttcagacataagctcgcgagggaacgtgcgctcgttcgtctcatcaccagccaagatcaaaagggccgagacgctgtggcatcgtggtcagacgtcgtgctctgaatcccgtgtcgcaacgacgactcacaaagcttccttcatgtaggcaaaggagaatccctcggtcttgccggcaaactcgtcgaggagtttgttgggaaacttgatgcggggattctctgccagcttgttctgccagtaaacggcgtactgacgacgttccgccttgacaggatcagggaaagtgctgtggcggacgagagcagcaaggacgatcagctttgtggcttgtgcaaaagtcctccgacgtcgacttgctattttcgatcaaaccgggacggtcggttcgaaagagccggatctagtcgatcaaagtggttggttgtggcgacctgcaaagacgacaatcagctccgggtccactgcttgcagcccacgaccaaacgctcaccatcaacagcccatcgttgtcttcgaggccatccacctcgttgaggaaaaacgaccggttattgtccgtaatgagcgaatcgagatcttcaaagacgacgagacatggcgcctcttgacgagctcgctcgaacacctccttgatacctgcgaccggatacctttagcgtattagcgagcgagttcaagacgacgtcgtagcccaccatattcctcgccctgccaggctaccacgacacgaccgagatgagccaggaatccctccacacgccgaccttgccatgctcactcttgaaactcctcacgtacagcacccgtttcgtctctttccctacgctgtccccgttggccacatcccgcatcatcgccttgatactgatcgtcttgccgtttccaggcggaccgagcaggatgacgccgcgtttccaagccacgtcgaggtccttgtaaatgcgctctgatgaaaagaacgacctgtactcgtggcgaatcgaggtcttcaaggaatccggtaggatgacgtctttccagtcggcctgcgaggttaacggcggggttcaagccgtcagtcaacgtcgaagccgatgccgacgtgcttgtccactgtagggactcaccttttggacgctctcccacagtttccggtccgtctgccagtacccgctatcaaacacgaggatagcctccctgacctctgaattccatgccgcgacctcgtggatcaagaggttggcggcgtcggacgatgtggccagggcaacgggtgacaccgtctcggggacgaccagggggaatgcttcctgcggggaccttccgatgatatgggattgggtgacgaaccgataagcggtaggatcaaagtactggcaaggggacgggttggttcaacgttacggtctcatcatccgcaccgagcctcgaactcactctcgcttgccaaatgtcaaactcgatgcccctccaccagacctgccatccagcaaagtcgatctgcgtacccacaccaccgtctccctctctcctcttggccgatggcatataaatggacctggccgccagcgtctcctcgtggtcgtgccgtatgagacggatacgaatgtaatcctgatgccccggtgcgtttgcatagttgagcaatccgaaagcccggtccgacgtcacggtaaacgaagtcggctgatcggtcgaattgtatgccaacttgtggaatcgatcgtacagagcttgcccgtcgtcgttgccgagcgcagaaactacatgtcgacgaggttgtatagtcgcctcagaagtgagtcgatcgggacgatgtcaacgaactcacactgcttgcgatgtgcctcgaggaacgggctgccattgacggacgactgcgggttacggccgacgaatcgttggagatcttgctgcttgtacgtgttatcgtaatttccagggtcttgccagggtggaggaaagacgtcgagcggttgatggacatcgaaaactgattgatctgccgcagcgattgcaacggccgagaccagagacacagcaaaccacgaaacgatcgtcttcatcgttgcaaggaggtgtagtggtggacaatggcggcttgacgatacggcctacgagccgcaagccggaagtcgctattacttgtagtcttcagcctatctcttactcattgttctcacggtcaaccaactctcttggacggactgcacctggcctctcggtcggcgaaagccgaaagagcttagccgagagacgtccacgtgttcgttccactcggcagggtttgcgctagtttaaggtttaggattgcccgagacccgaccggccggaatagaattcaagtcggtaatctttgttcgtgctgtgcaattcctgatttctttcttgggctacagtgccgctactattcggtcgcgacggaaacatcgactaccttcatcctgtgcgccacatcgatctgaagctctttcgtgtctattttccgaccgaaatgcagattaaatggtgatctaagcgagaccatgctctgtaaagtctggctatgccccgacgacgaggagtatagtataaagagcaggtcagacgcatggcttggatggtcaggcacaccgtggtcgcacttgtaagtttgcaaatccttggttgtcacttcaacatacatcaacgcaacatcggtatcttcccaaggatgactacagtcctctgcaacctgctcaaggcgacaatcaaagatcttcagcgtcttctcgacgaaaagaaatgcgatagcgtggacctcattgaagcttgtctcgtaggtcgtcacgttgtaatgagcgatgtccccagactgaggcaaggaattggcttataaacaggccgccatcgagaaagacaaccacaaaggtttgaaacttcacgctgtcatcgagatctgtccgaaagagactctattgaagatcgcaaaggacctggacgaaaagagagcatctggagtgagcggcagagatccacacgcctggaaccctggcctgacgacttgccttctcgatcggtagaataccctaggacctctgcatggtattcctctgctgatcaaggacgtcatgcatacgggttcagaattgggcatgtagacgacagcgggtaattttgccttggacgacgcactggccgcggaggtaggcacttgggttgtcttgctacaatcagtcaacccatgtgctgatctgctgcgataactatggatctttgctgtgtcctacatgccgtgctgttggcacgatatcggtcttacaggacgcggttgttgtcaaacgcctaaggcagagcggagcaatcatcctcggtaagcctatgccaaagttttggttacgggatcaaccgagatcactcacagttgcctggctatataggtacgacgaacatgagcgagagggggaaccttcggcaggtaagcttccggcgactgcgatactgcgaaacagcaagacgatggcaaactgagacttcgcgctgcagcaagggaatcagaaggaaggtcttcccggctggaggttttccaagagcaatgagtggagtgcgcgaggtgggactttcgtctctgcttacaatccggagcagtctcctctgggtgagaatgtcgattgctttttccgtttttcgtcggtgtgttaacacctcacgtctctccgaccacgatagggagcagcaccggtagcgcagtaggtgtctctgctggtttcgcgcccgcggccttgggcaacgagagttgcggttccatcactgcgccgtccgatgtcgcggtaattaccaacactcacgctgagactgcacccagggctgaagtcgattccgattcccgatttgtaggggttgtacagcatcaagccaacgtacgtcatctctccaggagtcaagctcgttctatgggagggtgaaagagtccatcggctttgtgtgtagaaacagtcccggcttaatggaccagaagggaactgtctctctcgttccctctcggacggccataggacctatgacaaagtctcctaggatgccgcgctcttgctataggtaatgtccggtccgaacctggccaaaggcgcaggcaagttgcatcggtcacggcgcgatttagtcattgaaagcagcgctgatcaacccaagcgctttttagagggacgtccggccacaaacaagggggaatttcattacgtcaagttcacccagaacccgactttcaacgcaagaccttgggtttctatccttggcagccatttgccagcgctaccgagtgagcttgatgaccagtattggacagacaatcagcttacgggctgttcgtattggattacagagccgagaacacaatgaagcggtaaggttgtttgatagagtttcgcccccaacggccaagcctaatgtaccaatcttcacgtcagccaatccatcgctgaagctgtgttgaaactgcgtgtacacggcgcaatcgtccttcctgaactggataaactgccgttcgacggagccaggttccaagccttggatgacttggctcaactgacagaattaaaattcagtatggccaatgcttcgattctctcagccagacttccgtgcagattcttgcagacgtcattcagtgagtacctccgcaacggagcgggcattgagttcgccctttgctcaatttcagtctggatttctgtttatacattttcgctcgatacaggttcaacatcgattacaaggtgaatgatggtgtgcgccgatcactagcttaagattattgaagatctgcctttacaggatgtcgagatgcctcctgaccagcctggtcaggcgttgttcgtcaaagcacaggcggccaagggctgtaatgaccccaatacatcgaagctgtcaaaacgcgtgagtgtggtgaagaccttccctaacatccgccggaacgatttaaagatgtcctgctttgatcgcagtcgagcagctgtctggccaagatggtctgaagaagtatttcgacgataatcggcttgatgttatcgtctgcacctttgcggactctgtgggcgtacccattatgcttgcaggtgccgccaagtacgtgctgactgattgataactcctgccgcaagcctgcctgttgaagaatgctctttcgcgtatcctcaggtaccccattgccactgtacctttgggatatgacgaagaactgcgcgagccgtttagtctatacatgatcggtcgtccgcacagcgaagggctattgatcgagctcatgtgagtggaacttttgtcaggtgcatcgaagtcgagccaaaacgactcacgctctcgacggccgtcttctgagcagggctacgtgggaggtgatgttccctccccgccgcacctcgccagccttggagacccctcaagcggaagctcgatgatagacgtcggacaacgctgaattggtattggcgtagccatccattatgatgcgaagctatatgttatctttgctttccaggcttcactcgtgttatggaagtcacatttgaaaattctgcctagagcgtgaaacattgtcgtcgtagccaatgcctttgttaaggactgcgcgcttgatcggaaggtcttttcccagacgacgcacctctcatgaagtatggggtggcgcagtgtggcgtttgtccgagatcggtgtctacccatatgtcaaggctccgtgatcttgagccgccatctagcctggtgaacggaatccgtataaattctgtcggctttgaccgcgaatgcagaaccgagcacatccgatccgcgactattgcctgtgcatcgcaagtgtgccgagtcttttcggacggacctactccctgcggaactcgttgttatagtggcagtcgcgattcttgacaagggattcgtagccctgatgataatgcagggatgtatagtaaggctacagtctggactcgaactgcagtctctcacgcgtggacctcgtgagcagggctgcaagacgggaaccagtgattcgaagcttagttcgacgactgggaacacacctaagacgctgtggcgaatgtgtaatacttaagaatctcagtgatctgaaggatgctagacgagtgtcagcatccgatacattctgacgcctacctcaaacgcggactcaggcctacacacactgtacttgttcgtgaacctcgatctgacttcgtcgcatgctagatcctacagcgcttaataagcatgtccttagcaaggacacgcctcttcctggcattttgaaagacagtagatgttgttctttttggctttcccgtgtggcgcttctcggtcgcgtagtttttgattgaggtctttccggatatgttcgcggtgaggtccttcttgtgcaagctcttgacgggaagagttttctcagcagggtgactagccgaggttttgtgccgagagagggtgccgttacggacatcgccctccgaagggtgtttatcggaaacgtcgctgctggcagtggtttcagatgaccttctctcggctatgccctccgtggcatcctggacgttttggctcggaccgttcacttggggcgatctgctatcgggaatatcgttccgacgtgcattccgctcctgcgaagtcggcgccaggctcccagacgagctggtctcagctacaccctccccgatatgtacatttccgttcgggctcttttggagcgagcgactctcggaaatgtcattctgaagaggtgtccgctcctgctaagtcctctccagggtatccgtaaggtgctgcgcagggccggacggcatggagctctaggcaggcacaatgtctgttacaccttcttccttctttcagtgcgacgagagcgagggtatgcattcgggagcgatgattcaaaagtgaatctctagctgccgctccgatttgagcagctgaagtagatgcaggtgggaggctgaatgatgctgattccgaacgttgcccttatcgcaactctcgtatcttacggccttgcccaagagagagtaggaagcaccgtccagtgcgttccggctccatcaaggtcgcgatcttgatcagaaaacagtggagcgaatcagacttgtatttccctcagacggtccttctcctggtctgttagcaaacccatccgacgtaaaagatctatatccaactttgcccactcaatcgtctctgacttgacccaatctcgtctggctttggtgacaagctcgttcttcgtctcgcccagctggatgatgtcgaacctcccatccttcatcgctttgataacatctttgggattgactccgtttgccaagatctatgatcagtttctacctccagtcaggattgctttatgacgccaggtgaaacgatcgggccgtaactcacgtaatacacatcgccctcgatcttgggccaaagaaggggccaatcacgctttgtaccccgcggaatctttcggaagccagggggagtggtttgtggacggtacggagggatgcttcttccggtgatagtctctgtggctatttcctgagcatgggtagttttcggacgagcttgcttggctgattccctgagagaccggcgcattgtgtttggtaagatcggacaaaggaggccgaggtgcgctaggattaagatgagacggttatggtgtagggtgcattactctcggtcaacgttgtatacctgatctacagacagtcgatcaagaacagagccagcttagaggcagacctggccgggtatattaaaaaataccgtcaagctgggtctcttagggccattgccgtcaaagcaattgccgctcggccttgtaagtctcgattcttttttgttgaacatttttaaccactgagaacctcacagacaaacaggagctatgcacagagcttttgaggacctttgtcgctgatgtcaatgccgcacaggacgatgtatctcagctcaaggacctgcttatgcagtacgatgcttcggatgagagagctctgcaaaaaagggagcctacgcttcatcaccaaatctacgaggtttatgaggagaaccggtctgaatcagggcaagcgacttgtcagaggcagtggggtgatgtgtggtgggcgaagtgggacttggaggagatgcctcaagggagaaagctgagagccttggccagtatagcacaagcgaaagtgagcgaactctctacatccaatgatgccgatacgatacttatggttctctctgttgtatacgtgaatagtatactctcgatcaagcatacgacgctacccaggttgtcataaggaagttccgagacgtagagacgaaccctcctcccgctcgccgtcgtaaagaaaaactcccagtagaagtcctggttgaggttggcccaatcgtcttcatccgctatcactgggccatccatactcagaccaacaaccaatgctgctgtatcatcagcaacggggagcagcagggtccgaggagaagcgaccgggacaagcaagagtgatacaactcgacttttcccagtagcgataccctctgaaactttgcttgtgaattcatctgaattcaattcaaggtccatcgtgcttcctgcagccggattcactggaacaagggacttgcgctcttccgcagcagcggtagtacccgacccaagcacgtctagtgcaccaaacaacaaacggcatcgacaagacttgtgtgcaggggaggaggaaagcaggacagagaggcagcgaaagagcaaggccaagcgtcctcgacgggaggcacaggacgaatccgataagtcagattctgagaatcaagacactgaaagtgaggctgggacacagtcaaaaaggaacagcggtgatcgggtaaatagcaggagattcgcctcggctttggtgggacgacagggtgacattagagacctctaatccttatttacctcgaaatacctactggaacaaagccaagaggataatccacgactggagagaagctttggacttggttacgggagacacacaccaaaatccttgttcccgtgacggccgtctcgctctcgaaagtctgatgcggaggcatccgaccgccttggactccgcagctgccatacttgacaagagattcctcgatgccaaacacataattgctagtcggaatctcggtggcttttggcacgaataagataacgcggctaactggtcctaagcggctaggtacacaggagaaacccagaaggtggagtggggcctatgaggtgccgcatcaatcgtttactttatgcacaatccccgcaacctgagactccgagcctgttgattggactagccctaaccttaaccctaaccctgaccctaaccctaacccggttcgactgtcttcgtatgcagagggagcgagaaaccgagggcgacatcagcagggtgactggggtcgaaacgggggagattgggcctttctctctacgtgagttgctcgccgtgtacgtcttcgacgacagtacgctcaatcaacaccgaagttgcttacgttgaaagcgggcatgtacgagtatgtctgttgtgtaagccgcgtcgctgcgtgcacctgtttcccagaacgcttaccgttccgacttgttctttctcgacgagtactttccgttggccttcgactacctccaccggctgcttccagcgactgccttgcctcgtctgacaaaactgcgtaaatcgagcttcttcttgtctacctcttaggggtcaaacatgctgtcaatccgtccctgtacttttcatacctggcgtggacatcaggagccagcagtctcattgtgttgttgaccaacgagaggaagccatccagttgggcttcgtatttggcgatgatcctagacttgtttgaacctcccatcgtctcgctggtgaggatcgggccttttgggtcagcttgaataagaatcttttagccgagatggcagaccccgacattatccttgccatactttgtgatggcggcttccacatcgttgtgacggttgtcgacttcggcggcccctggcaaagtcgggttgaggtcaagccaagaggtaaacatggcgaggttcacctgggtaagatgcgcaaccatatccttggacattccccgatcgatcttccacatgacgaggtggccgtcagaagtggagttgaccacagacccttccacgagggcgagagcagccgtctcttgatcccatctggccttgatctcttcccattccgccttggcgcatattttgccatcgggatggtctcggatccagattcctcgcatctcactcaattgttcgagagtgtaggggagagtgatgcattgcgcatcggccccctttgcgtccagcatgacaccggcctctagcaatgcgaagggggactctcgcaccaagctggccgcccttgctttcgtctcgacggtagagttcgagcatgtgagacaagtgggaaacaacggcaagattccgacagacagctgccatcctcgatgtctttacgtcgttacggtcgatgaaatttgcttccgtggcgcggggtcccagccgcacggaagcagttgggcatacaggcgagggcggggactggtaaacacgttcaaatgcggagaatcgttccagatgagggagttggattgacaatcaatcgatgaagccagcatcgccacaacgacccaaaactccgctcatatcatagcctagccctggatcgccgcctcgtctaaccaaggtgacatcacactcctgcaggccccaaacaatatcctcactcgactcaatgtccagccacaccgaacaccccgctcggcctgccgcaaagggtcgactgacccagacagtcacactcggtctcaactcggcttcgccacagatcatccatcgaatcgccatggcaccgttgaccaggatgcgtaacgcagacggtactcaagcacccaagactgaactcgctccggaatactatcaacagcgggccagtaagaatgggttgctgatcaccgaggcgacctttatttccgaagaagctggtggatatcccaatgcaccaggcatctactcggagactcaggtgagtaggattagaacttcctcgtatgatcaacctgctgaggacgtttgaaacagattgagcaatggaccaaagtgaccgaagccgttcatgccaagggcggtctgatctggtgagtcccattgcaaacagacttggggaagcgatgtaataaccctagggacgtcttgttagggtccagctctgggcacttggtcgtgctaacggaggccagcaatctcacatccccatcgtggctccctctcctatcgccattgcgactgtccctcaacctggaacagacaagcccgttgtacccacgcccaaggagatgtcggtggaggatattcagaggtatatgaagagttacaagacggctgccgagaacgccaagaaggctggctttgacggtgtagagatacatggtgccaacggctacttgatcgatcaggtacgtgccccttcaactttgctttctgatcgcctttactgacaatccgtcgcttgactagttcgcacaagccgtgtctaacaagcgaactgacgaatggggtggttccgtggagaaccggatcaaattcggtcttggtgccatcaacgccgccgtctccgtgtttggaccggacaaggtcggcatccggctttccccctggggacggttccaagacatgcttgatgatgtgagtcggctcgaattgacttgacatcactagaccgagccactgactcgtcattggttgcactaggacccatacgagacgtttgttccctatgtcaaggcgatcgtggacacgcaccctcagtttggggtgagtagatcgtcgtgatccctggacagcgagcgacaactgatgtatgcttgtgcagtacatccatttgaccgaaccacgatcatggacaggtgtaccggacaccaagttccccaaagatggtatcatggagagtaacgactatgtgagtgcatgagctttggtcgagtcggttcctcgaattcccggattgacatgcaaacgatactgccacagttccgcgcgatcatccgtggagtcgacacctcgtccttctcatccccatccgactacgccaagaccgagccaaagttcgaagaccccacgaaagaaaaccctatcgtcgtcctctctgccgctggtcacgatgcagagaacgtcgaagcattcgttgagagaacgggagatgtcgctgtgttcggtcggttctttagtgcgtatcttgacattgttgcaggactacaagcttgtcggtgctgatgttcgttgtttatagttgccaaccccgatctacccgagcgaatctacaagggatatcccttgcgacattacgatcgaggtaccttttacagtcctggtccggttggatatatcgatctccctacttatgctcaggagcagcagaaggctcagtcagtgtcgtcttagagagagaaagacggtgtgcagtggttgcataagggttgtatgtagatgagcggtgatagcatggcattcgtctcgttaaagaaaatggatttcttcaaaacgaatgcactgggcgatggaacgaattatggggctaaagtcatttacgtagtccagtccagcggattgtagcaacgtcaacagcagtcagataaacagtgtcgtgaggctgggatctaacccacagcaatgccggcatttcgacgcagatgaatgagcaaatcacaaggaggttgctatgtgtctttttgtgcgctcagaaggcgcataggaggtggtggaagtatttaccgacccacccaggtatcttcattcttggaaacgtgttcatttcgctcggcgatccacatgaaaaagcggagtgaggtggagatgcaagcccaagcctggacgaaggtcggtctatatcaagcattctgccactttctccctatctttcttttcccctcgcttttcatctcgtcatttctgtgatttcttcctcatcgtctcggtcatggtcgaggtcttctatctctctggctcaatctggggttcttcctgaggctatggttatcagagacgttcgatgctgagtgactgacagccaacccaaggttggaaggatacatggtcccgaaggacaggtggcttttgccgaggcgagtcgaaggtacggaacggtaactcccgcgaagacgctagattgacagatatatcaatcgaagtatcaactcaatgtatcaagctattgattgtaacgcttggctcaacctagtgtaggatcgaccatacaacagtgcgtagagacgcacaagcgggtcccctaggcaggtaggccatgatgatgcccgctacgggtatggtgtccagcgatgccttactccctggactagaaaggcgtttccccggccttgaaaggaccgatcgcgccaaaattccctcggccatactttcaactagcgggaaaaatcggtatcacgtcatggcacaaggcatagaacgatatgaaatctgggttgcacgtatgctttcaaattcatctggagacagcgcgcattcggccgccgacgttgaggagactgagtcgttcaaaatgtaccccgccacatttcctgagctgggttgatttgccgtcgagagatgcctctgatcactggtgatgaaagagccagagggcaagaaggcggtgcatggctggcaggaaccgcgaattgcgggccaccggttcatcaagaagatcgaggcttagtgccttcctttcctttgggcacgaatgacaaatgtatcgaaatgcagctcggtatcagtttcttcttacttatcgaaagcgcccacggagcttttgcagcttgtgcagcgtcagggtccagcgataacttcgaagtcgctcgagcatcagctcgatcgatgcgttggctgcttctcgagggtccctggcagaccgttgagcctcgcagtgattgtccctaccggacggagagttcagcacccgttcgcgttgcgtaaccatcctagagctgcgctagcgagtcgggccttccgaagactccaaaagtctcagtttgccgatcgcgcgaaaggtcattcgctcgcaagtgctcgttcccgcatagcaatcaccccgcgagtctactccaaggaagaagagatcgcttgtgttgcaaaacagatctttggaggctcttgtagacccagggattaccctcgattagtggttttccgatagtgtcaagctctccctccaatctacagacttgactctattcagataggctgagcgaccgtgctggtttttcgcaaataaaaagtgccgcaagtgcgagatgtggcctgacgatcgcagctcgatttgatcccgagtttcgaaaatgcgaaactccagggtcaaagccgtccctctttttctgagtggcgcttgaggcccgattcaggggcaagcggttcatcggtcgtacctatcgggctataaaatttgtgattgtgttctacgagcatcgctcgctgtatgccagcagttccttctccgaagctcgatgaggtcacaccatgtggactgccagtgttccgctccacagatcggcgacacacctgcgaagtcgctaattggaaacgagtatataaaccatcctcaaaggtgcaccagttcgctcaatctcatggatcaaagtgtcgcttcttcatctacacttttcagcttaccagtcctacattcgacaactcattcttcgaacatggctatgcgtactaccctcttctctgctttgacactggttacagtggccaccagcgctgttgctcagtcttggaactttgcaacctatcgggtcggcgacaatcagaagattgtctcctacaccggttccatggtcgccccaactttacctagagccggagtctactacctctggcctggtcttcaacccgctgacgacagtggtatcttccaacccgttcttgatggccgctcgggcggttggtggttcgggatgggttggtgttgttcaaacccttctctggcttggggcggtggattcccggttgaagccaatactgttctcggctttaactggacactagttgactcggagtcaatctggaagactaccatcaccaacggcatgacagggcaagtggtcgatggggaatttccccttggtcagttacagccgcgtcttgcaccaaatggacgagtccctcacgaatctctgtgttcactatctgcagcggacaaacgattcaaccaggccgttcttgccaatgaacgctacgacgtcgaatgggacttcggtccgctcgagtttagggacatcaagatcgtcagtatcgttcattcaataagtgtcataagatgctgacacttcgctgtgctagactactaccggaaccgatgactggtggtgtaatgattctccctacaactaccaagatggtaccgtgacaagcgtttctggactacgatccgtgaaaggtgaagactcggtgacctgtatcatcgataccttcaccctcgagcgtcctacttagggcagagttcgcggcactcagctattgcgaatctatagctagtagcgggactagggatggggatgtcaaccaagattcatttctagcggcatttgcacacatccaggctgtgtctccatccttagtggttaggggttatcaatgtatattaaagatgcagccctctggaacgaagtttatcgcctgaaacatcaatataaataaggttttgaatgggctgttcatacacgagtggcaacgacgagtatgacgagcgctatgagactgtgtgggacacgtctgacttagacggccgcctctctcgaccgcccgctttaggcgccatgacatcatagcttatgagatgatcacggactccatgatacttttcttcccattctctgctcgcccggttgattcgatacgcagaaggcaagcttcccccagcgtcctcgctaggtctgtctgttgtcagccattactcacgctactctaccttactataatcaagcacttgacggccgatagactgccgatagatctgcgtctatcggggggtggacgaatgaacagactgagccctagcttgtgataagatcacgcctgcacacagcgcttcaagggtccttctaggacatacttgatgtacctagactaattgaggtccttacccttgcacagcccatcggctatgatcctggggaggctgtgaacgcttgcatgaggttcatcgcgcttcctttcgctcgcaccgctcaatggatcgccttccacgagattgacggctggtccacggctggcgacttcgccaattgcgttgtatttctctgactgaatccgccaggctttctcgcgggaagtcgaccgcttcgagccaaagacaagggagattgtatcataaagatgctaaaaagtcgttcgtcctagatatctgtcctgtagagtacgggtcctgtcccttcctctcgattgtggtaaggccaagtacaaccttttcccttacatggatagcagcaactcaatggttgattcgtgctcggagtttcccgacagacacccaaaggacagactgtctttctatctgccttttcgacggacttagaacgatgtggtaaagaaggtaatcgtaaaaggctttctgagcaagcgatacgaatgcagccactcttcagccgatcgccgcacgatgatccggaactcaggcgctcgatagcacttcaccttagccatcgttccaagtgaactaagtaacgcatttgccgggctcgctacacatgtcaattatgcggaagcaagtaatggtacatcgcatagcaaagtgatattctatcatctttggcgctgcgatctgttttctgcgaacttggggattaggattcttttactcagggcaaggtttaggttctacgatctacgaagcgtgatgaaatggcagccaagaggtgtgccaacgccgcctgagttcgatttttggtcgacaccgtagtccataacatccctgattcctaacctctaacccttaaccctcgattccaccttgtaaccagcacccgatgtcgacggtagcaccactatcgataacccctaacccccaaccccttgatagatgtcaacgcggccattcgccagagagaggggccgatctgcaggcacgacgtccgagatctcaagtcggcagtagagagacgatcaaagtcggatgaagtagccgtgccgcatgcagctgcatggaacgatcgagatggactccaatctgaacctcgtttcaaagattgtcgacgtgctgcggaacaggaagagacggtggttgaaccggattgtagggtcgtcggcgatctcacgtcggtgtcgttctcgtaatcctcgctagaatcgtccgttctttatggctatcaatacggctatcaatacggcgagaacgttgctgtgaacgaggcatgccgacgatatagtgtggatgcgaaagcgactctgggatgtaatggtacgatcggagaggtcgtgcatatttgaccatctactagtcttgttgatcggcctagcccgccgcgtcatgacctgtaccgatgtcgtatggtggcatagactttgcattcgatccgtcacctgggcatcgaatcaagtcagtcgtcactaggcccaccggctctagtagtgactgattcgattcgctactccgacctttaacaacgaccccaaccgacgactttgacgcgatgcaacgacctcctccgcagaccgtttctcagagcaagatcctggtcttgtacactggcgggacgatcggatgtttgaatacagagagagggttgacggtgcagcctggatttctgagtgtgagcgagggcagagtcgatgtcgagctgggtgagctgacgacgatgacgagcaggattggctacgttcgcaaagcgctttcaacgaccccaacgccggaactgcaagtgcgacctgtgccccccggtagacctctgcctgacctcggacctcgatcgtctcctcacaggtagcatcgcacgcccactctcaagccgtctacaatgcgtggctgggttcgactggtcaaccggagactgccccagctgatcaggaagagcaggcggtgttgacggggtttgagactccagacgaacgtactctgatcactccggtgtttcgtttcggtggagagatgaaaaagatcaagtataccatcagagaagtgagtcgagcaagggcgtgaccatccgatgcacaggctgatgaccccgagcccttcaacagtgtgagtcggtcggggccagcaagttgagacgacccttgaccccgaccctgacctctatgcctcggcagacgatcctctggttggctcttctagtatcgactcgatcgcttggatgaggatcgccaacgacattcgcaattcggccaaccattttgacggttttgtggttttgcacggcactggcgagtacactggggtcgttgtcgaaacgtggacctcgatgctgaacctcgacgatagacaccatggcatacacggcatccgcattggcgttcttgctggccgacctccccaaacccgtcgtcctaaccggagctcaaataccactatgcgaatactcgagcgacgctaccaacaactttcgaggagctcttttatcggccggcatgaaggacctgccaggcgagtcatgcccccaagagccaaccccgcggcacgacgtctgacattgcactccagaggtctgcatctttttcaatcgcaaactgatgcgaggttgcaggacgagaaaagtttcgagtttcgaggtggatgcctttgacagcccgctcatgaagcccttgttgatcggtgagtctgggatctgatgaggcgccccgggagtcgtactgaacgacccttctttgttagccgacgtcgaacacagctaccaacgaccggatgctccctcggatagcaagagcgtgctcatgaacgccgttgcaggtaggtcgcggtccgacgtctttcgttgcatagctactgacgtcgacacccccgcagccatgtccgaccaggtcatcatcctgcacatctggcctgggatgaccgtcagccaactgaagatgatgctatctgacccggaaaccaagggtgtcgtcatgtatacgtatggagctggaaatttccccatcgtgcaggaaatgctagacgtccttaaagaagccatcaagcagggtctcgtaagcagagacgagtcgagtcgagacgcaaacatccgactgacacgacggacgaatacagatcgtggtcaacgtctctcaatgcgctcgaggcaaggttcttcccctatgtacgtccagtctctggttccgtcgcccgccccctgacgctgactgcccccccatgcagacatcaccggcgtagtcttgaacgagatcggcgtggtggctggcaacgacatgactcctgaatgcgcctttgtcaagctttcctacttgctcgcccaggatcacctcagtctcgaagccaagaagcggtggttgggcatgtcgatggtcggagagatggcttcggtcgcgacgtaatccagggcgaggcgattatataatactttttgggatctcttattctccggttggggcagtcgacgaccatgtcctgataaggtggtccccgaatgcttgattgtttcggagccgtcgccgttgccgtgtgactcggagatgaccgccgtgaaccctggcccttctcgagcgtttcgccaccgttgaccatattcgagcacttcctttgacctgtcgacaacccctgagctcacaccaagacacaatgagacgtacacactctagtttgagccaaaactgaatgtagtgaagcagacggtgccggaccgtacgctcttggaacctctacgatgacctcgctagacctcgctcacggtatggggtatgtctgggtcgtcagattgagcgacgatcatgtaggccaactggatcctccggagaacgacacggacgttttcatttatcaagacgcccacgacgacgtcgacgctgtggactctgccgatgaggaagaatggagccagtcacccgtcgtcgtcagcgagatgatccaccatccaccttcagtcatcacgccggggctggcagcttgcatgtcacctcggcttagacaggcaagtcgacggcatggcgggccagaacgatctctatatgctaaccccgtgtcatcccgcagaaactcgaagcccaggccaggaaacgctcacacccgcctgacgaccccatcaaaaacatcgagccgtttgctttctttggagtcaagcaagccgatcgtaagcgtaccaaggtcgacgccgcacctcgatccataggactgccccggcccatcgacgtgatcgttcgtaacgccgctcgactcactctcgcttgccaggctctcgggttagacgagacctcacccatcttgtcggatgagcaagtgcagcgatgcctgaatgaccgggctcgcagaccgtatcaacgtcgatttggcgagacaatcctggaggtacatcccgacaccgtcgactctgaacttgctctcattctttgcaactcggaccacctcgtccgtcgcacgttggcccgcctcgtcatgtgggatgaacccgcatggaaggtctcgctctgtctcgaaaaggaagcccaaagggaactcgtctgcggagccatgtttgaacctcggggcctggatagtgctttcgcagacccggttcgtcggtattatctcgcctggtccgatgacattcaacccgtcctcgatcgattggacgggatcatcactgacatctatggcgaggcgagttcgggagccgtcatcgagcgtctttaccgggaacaggccgaggggatacgcagtgaagggcgctccaagaccccgttgctgggcagactcgtcgacatgtgcaagatgtggaacgatacgatcgccgggtacaaggtgcaaaagctgctctttgccgacgggctagagaggtgttgagcgacagacattttgatcaaccacgtacgccgctccaccagaggaaagaaactactgaatagattgggctaaatcgaaatgacaagggcaatgaccccgggtaacacgaataacgaattgggacaagtgtggcgcaaacattaggacgtttctgtataaccatatgcaatggcgtaaagatcagatcgtgcctatgcataatgatgccgctacgctacgtcctgacccatagctcatgttgaaacttgactccctgctcctcaaccacgcccgattcgaccttgaaacgaacatgctcacacagctcgagatgactggctcgtgtccaggtggccgggtcgaggtctggaaggaaagcgtcacaatcgtcgtacgccggttcgaggatccttgtcaagacgatgctgtgaacgacgtcttgagcgagagcttcccggaacaatgacgctccgccgatgagcattgctttgcccagagatgaagatgggatactttcgatcgccgcgggtaggtcgttcacggtggtgatggcatggtttctaccaggcggggaactcgacgtcgtcagctcggtccggtaggcgatacttcagggctctcgtcgactcacgcgtttcttgttgcctcggcacgaccgacgacgaccctattttgacggcctcgttggtcgctgcctagacgttcccatacggcatcgctcatgatcactgtattccgttcgggcctattcgacatcgcgctatcgtccccggtggtcactacgagcagccacgattagacatgcagacccggtcgcaacgatgagcaaacccgactgacctcgccgttcaaactctgccaacctcgatggcatccacggaatctcgcccttgcatccgattccattcttcgtggtggccgacacgacgatggtgatgggtgttacaggacggtgggttagatacgggtcaaggacgtgttcacgagattgttgcaaagtcgatctaggagtcgccgctgctgctgctgctgccgcgtcttgcaacgatccgatccccgagttgagatcgacttgcatcatatccgattctattcgcggactttgctgttgatcagagagctatagcggcgggttcgaatgggttagcagacgccttgaccgcaaacgacggacgggacctcacctgacgacgctgcgaatcgatttcgggcggatccaccgaatgagggtctattcgagctcccgactgttgatccaagagctgtcaatgtgagcatccgatcagccaatgaacctttttcgcgcccttcgaccccgggacgacccgcacctgacgacgttgcatatccaccgcattcgccatgaccctcgatttttccctcaacctagtcagagccactgcaacacgatcgtcctgttcgactgccgccgctcctgatacgcccgctgctgccgcgttgatctcgttggaaacgttgagaaggttcctgaccacctcgtcctcggtatccatcgaggccgtcgccattggtaccgcaacgtcaccgattgcttgcgcaggatcatccccgtcggtcaggatgaaatccccatcatcggtaaggacgcctcgatcaggtccgaccacacgtgagagcgagtagacgacgtttctcaaaaactggttttccatcctcaacgcctcgttgtcctgccatcgacgtcgggccggtaaaaacgacgacgacctggttgaagcacgcatcgatgaccgactcaccaactcgacctcgcctaccctctttacccccgaatcgatggcggaattcaacctctccatctccctggccttttcttcgagttctttgatcttttcctctcttcgtcgtctaaacgcttgttgtgcctttcgattctgttcggctcgtttcgatcgtctgcgtaggtgaggcacatgacatgttcgcaagaggtccgggtcagacgtcaaagatcgagctgcgaaccaagaacgtgcgagttggcactgactttccacctccgggttggccctgttcatccgtcccatcagcttcatcccctcctgatccgccggtcccagctccaccgacgatcacatcttcacccatggataaagtctgatcctgcttgcgtttcctcttgttccccgtgcccgtctttgatttcctcttggatgcagtaaccccagccagcccggcaacgtcgagatggtacgggtcgtcgtgctccatgttccgctgactcgaatcctctcgatactcgttgaccggatgatcctgctctgctactattcctagattcgtgcccgctcctaatctggctaccgaccctgaaccggatggctcggcgtcttgaccgtcgttgttgttccccgtctgtccggccaagttgggtaccggaggtaatgatccgagactggcgagcgaggacagtgccatgagggcgtacgacgattctccctgttgaacgtgcccttgtggtgatggcgacgatggtgttggtatcgagatggtcgtcctggattcagaagccatttcatcgtgtttccctccgttcgagccgtcggtctgagcggccatggccaattgtctcaggtcgtcctctgtcgcagtaaccgacaatctagccttgtctgacatgtctttcggggtgacgacgtcggtacggacgaccagaccgaggtcctacacgtcgtctatcgagcaatgtctgtgtgaagaggtcactaggtcgcggtcgtctccatctggtcgagccggtcgagagatggtctggtcaacgtcgatggggttcgtcagatggctggaaccgtgagctatatgatgttggactacctgtcgtgcttcaggtcaagcttaatgggttcactaaaggactagatcgatcttgtgaaaatgggtggatatggatattcgaatggccatcccactcgacctcggctgccgctcgactttcgacctcggaatccaaccctcgactcggacgacgacctcgacagatggacaactcggaccgttagtcgttgtagctactcctaccccctcagcccataatgacaatccaagaagcaagtcaagctcgtcgtcgttaccgatgtccttcaaggatggggaattaccactttgggcgcatcttagggctcgtgacgtcgtttgctgtgtcaaccgcccaactccgggtcagtccagttcagatacccaacacttgctcgtcgttgttcacgtgcatcatgtccatcgacttggtacttgcatctgcactgtcggttcgtttcgctaagggacttgaacttccaagtgtgcacagctctgacacacaatctgacttgccaagcagttcggaatcacaaaccgaacctctcctttgaccgttatcgtttataatcgaatcgaatcacccatacccaagtgttgagcatcctacaccctcaacgtctcccataatacgataggcaagtgccacggactttcaagtgcagctctgaaactcaacgagactcgccaaatcgcctcactcgaccacagtcatgtcttacaacaactataaccagcaatacccccaacaaccagcttacgggcaacccgctcccaactcgtacactcagccgggatacggttctgctcctcctcctccgcagcaacagtacggagccggaggtaacacgggttactacggttcaggcccatcctatcccgttcaacaagggtatggtgcacctcctccgcatcagcagcccgcctatggacagcagccgacgtacggacagcaaccgacgtatggacaacagtcgacgtgcgatcaacagcctgcgtacggacaagctcagcagcctgcatatggacaagctcagcctgcagcgtatagtcaagcccagcagcccgcatatggacaagctcaacctgcatcctacgttcaacccggtgctgcaccctacggtcaacctccagccaactatggcgcacctcacacatctcctcaaacgggaatccacgccggtgctccccattcgaccgcaccctatccccaacctcacggctacatcgccccgccgccttttcaacccaactcgaactcgccgccttactttctcggcgtcccgatcccagctcctccccccgctccgcccctgactcccgcccaactcccttcgtactcggccacgttcgacgtcgatcgtctccgcaaggccacgaaaggctttgggacggacgaaaagacgctcatcgatgtgctctgccgggtggatgcctaccaggtcgacgtgctctccaggacgttcgaacagaccgtaggcaagtcgttgaaaaaggtgctcgaaaaggaactctcgtcgtggttggaaaacggactcgtcctcctcagcctcggcccgttgatgggtgatgtccacctgttgcacagggtgagtatcgacaccgtcgtcgcacgacccgattccaggctgacttctaccacgacctggaccccgcaggcgatggccgggatgggtacccacgaggatctcttgaacgaggtcttgctatgtcgaagcaatctcgagatgcacctcttgaaagaagcctaccagcgcacctatggcaaagacctgacccgtgccgttcagggtgaattgagcatgaagaccgagaggtgagagtcgaatcgaggcgtcgccgtatcaggactcggaggctgacgacgttacggtgcgccccgacaggatgttcaacatggccctctcgggagctcgtgatgagaatccccaggtcaaccactcgctcgtccagaacgatgtcgaccggcttcacgctgctggagcaggaaagatgggtaccgacgagattggcatctgtgggatcctcttgcaacgcagcgatcctcaccttcgagcgctcgcccaggcctatgcgtccaggtacaaacgaacgctcagccaggccatgtcgtctgaattctcgggtcacatgaaggacgccctcatctacgtcgcccggtacgccgaagccgacggtcagggtgtacagcgtgatgccgagctactcgaagccgccatgtccggtatgggtaccaaggacgagcgactcatctggcgtatcgtccgtgcacactggaaccgagcccgattcgaggccgtcaagcaggcgtaccagggaacgtatggcaagtcgttgaagaaacgggtcgagggcgagacgacgggcaagtacgaggtgagtttgaagcgaggcgatgatggatgtcgtccgtgggaccagctgctgattccaggtccgctttgtctcggcgtatcagcgaatgctcgtgaccttgatcgatggatgaaatcgaccagctctgcgtgagaccttgccgagccctcgtcatatacccccaatgtcccatgtcgtgtacaaatctagtcataatgatcgtatggtcgtataaagatgagccttttccgcagagtcaaaatgccatggtcggcggcgtgcgtagtggtcggcgacgacagcaatgtgcccggcctcgactcattcttccggcaaaggtggcggggtgcgaggaggtgatggaggaggcggtgaagcaggcattggcggcaatgctccgtcgtcgtcactgccgctatcgctatccccgtatgcccccatgagaccacccaacccggtcgcaaccgatttcgaagcctgatctccgacgtgcccactcttcaacctctcccatgccgtgcggtacctcccatccgttctcaagaacgcaaacctgtcgtccgaatgatgaagcgtcaagatcctcaactcgaggacttgcgggttggcagccttcttgagcgaggccagtgtgtgacgcatcaggacgagtgtctgctcgggaggctgtacagggaggcaagatgatcagtccccggcgctctgttgtgagatccaggctaccaactttgtcgtccctaggatctagctctggcacttcgatggtcacccttgtcgcctcttgctctcgctcccgcaagtcgatcaacctcaacctctcatcatgagcctcgttcagacgcctctttttggtttcccgttgtacagcctggtccggtgatcgatctggagcggcctggactgggtctgacgatgaggacgatggagccgacctccgccttgttctactactcgtacgcaaggctacgtcgtcgtcgtcgtccaggggtaacggcggtgggaaaagatcgtccgagtcgtccacaatgttcaatctgaaggatcaacaagagtgtcgctcagcaggagcagccatgacggatcggatcactcgagctgagaacggattcatagagtctctttcttcctccctgaacctatcccagcgtcggttgatatgaacgggtggtcgtaatatgcctactgatagcatcttttttccgtcgaatgattcggcttccttgcccagcgagcacgaggtgaaggagggtatgtaggacacgcacccgaaagaagacgacatggtcatgtcatttgaggttgatatgggctcgaacagctagtcatttgcgaacaggagggctagcgaggtggttgactggatcatgtcgccgatcgaatagcaagtaccaaagtagcaacgaacagactctacccgccctcgacttcggtgcccttgctcgcgattccttacatcaacgtacaggcgattgaccgctattcgaacgtcgacgatatgaacctctgttcttgcgggcgaggcggctacgtgcacaagatggcaaaatctcaattcggtattgttataattcacatcatgaatagacctggaggtcacggctcgctcggtccgtgtatacgagactctcttggtcgcacttggctctttccggaggggctcgcattattatcgcgagtcttatcgatacaactgatggatgatggttacggtctatcatgagaatgtcaatgaggaaggtcgatgtcgatgtcatcgctgttgctgttgctgctgctgttgctgctgctgctgctgttgctgctgctgttgctgctgctgctggggcgagggaaagacctgattgatggggtagacgaaaccgtccgtcctgggctcgtacgggccgacttgattgacggcctcttcgacatccgacagcgatggcatggccgacgatgtgaccgaagcgtccgacggacatgattcggatttggccagtcgttgctgtccggaaggaggtcgggcgcgggacgatgcggcggtgttgctgttgctgttggggtagacggggtagtcttgtcgaggtttggtatcgagtccgagctgcatgggactgtacgttgtactacctgaaccgggatgagattgatatggctgttgttgatgttgaccggcggcggcgggcatcccgagcttgcctaggggataaggctcgaacccggtgtacccgacgatggacgccctacggtcagtgtaggtcccgcctacatgctgctgaggcgtcaccgggtgatgatggggatgatgctgttgtacgtcggcaggaaactcgaccgtacccgccggtgccgaccagatggtctcggggtgtcgcataccctgaccaccgtgcctgggaaacgacgaggtcgatgatgccgacgtcgaatgctcgccaaataccggtccatcggccgtcgtcacggtcaacgagacggggctgtaggtgggtgggtgcatgtccagcctgagacgagcagcgtcgtcctccgagacgttcctcctaaagatcggtcgggcgggtccgagtcggtcgacggcgatatggggggaaggttgcaacctgtgaatgggcgaggccaagccagggcttccggtggtaaagtcatccttgagggcaggttgcaacgaggtattcacgttgatctctgggacctgagtagcgaggcgacgaggtcgaggtcagtcacgatgtgcgccatggccgggacgggcacgggtgactaaccggtttgccaccccgttgaagttgtttgacaatgtcctgcaacattctgatctcgtggtccttcttgtcgagtgcccgggcgagttcttccacccgggtctccaactggtatacacgggaggaggcaaggtcagcagtggtctcaccgttgagggcgggcggaccgtgactcacgttctgagtatgctccattcgtcgtctgcgcaggtcttgttgtgctaatcggttctgctctttacgacgagctcgctgtgtgcgttaggtatgtgcagacaggagtgggtgtcaatagatgcttcgacgacggcgacgacgacctcgaactgaccttttcctctttggacaattcggccaccgtctcttcacttgcatatcgtacgagcgggacttcctgacccatgaccgcgggaccttgactcgatccgggccgacctgaagatgacaagactcgaggtcagtagagtgtacgaggtgacggcagcgcttcgacgacgccctgaactgacccaacgatccgggcatggtagggtacaaccaagtaggtgctcgactctgttgctgaacgtgcatgttccaaggttcagtcgaatctggcgccgaggccgacaacccatgaccctgatgttgatcgtcgatcgggtgatgcaagtaatgcggttgatacgacggggcttgatggtgagacgcatagtctgccggtccacgatacgtcgacccttcgatggggatggccgtgggcatggttgcatacagatgttgttgagcttgattcatctcgacggtaaagacttgctgctgctgttgatcttgcttgcgttgatacgcctgcaggaccttttgttgctgctgctgctgcttctcggatgtcccgacgacgagtgccttgtttgaaggatagacgaaacttcgcttcttggtaaggaccgagggaggcgaagagaggtggtaagaaggcggtttcctcgaatgcgacacggtgtccgagctagtagaatcccaggtgagcagttcggtttcagtctgatcaatgtcgctcgtgtcgtaatgtgaatcccacatggatgacggcgggaaagggtcgagtgcgatgttggggtggtgtcgagtttgataggacgattcgaggtcgagacgatctgaaccgggctagggtagatcgaaacgagagggagcgaacctgcgcttgatggcgatacgggctgggggttgatatctgatttgcgtttgcgatccactcgtaacgaaacgctcggcgtcgtaggcggggctcggttcacactttggcttgcacggcgacttggccggagtaaactctctgcccggatgtctcgaggtacagagtttcaaagaaaaagagaaatggcgtgcgttcccaggaggcaaggtccggatggcgtgggtccgacgatttcgatcgtgtgtgtgttggcaatccctacaagcgaccgactctggttgtgcgcgtggtggatgaacggacggagcacaaggagtcgagtgctggggaagatctcttgtggatggtgcgagcgggtggttgtggtggtggatgtggagtggatggagcaagcgcccgggttcgacgatgggaaacgttgtctcgacctcgactatctatatcgaacaggagatctcgcttcggctgcaggatgtcaagccctttccgttcaaacgatgatgatgatgccgtctgcctgcgcggaaccgaagggatgggtaccaggatagtagagagtgatgtgtgttcacggttgccggatggtgtaaagtcatcagcgattttaatctctacgatcgaaacccaaaaggaaggaaacgcctcgacgacgacaaggacgacggatcgagctaaacgcacctcctgagcgtacgtgcatgcatgatccccggctgctacgatcgggtcggatcacatcgtctgtccattgtcgttatggatgcgccattcgaggaagacggtacccacgacatgggggatgtcgccgctggttgcccgcactacggctcgtttcgattgaccgagattgctggatgactcaggggaccatgcgatcaagagacacgacgagtctcggcaggtagcatcgacctcggtcgccctcgggacctcgtctgttccttcatctctggtaaattctccattcgccgaggttagtgcgtcgccaagacggtcgacgtcgacgaccacgacgacgtgggacgtgcctcgaaaggcgatacgtggttgttgccgcccccaccgccccgcatgattctcggacagctcgtttgtccgaggaaagaacccacctggtacccatcttccgtatctgttcagagtgaacaccacgaagcctccgggtgtcgacggtggatcgcgaccttggacctctgcttcgtgtgctgcgtgcagcgtgttgaatagattcgcttcgtctgcatctggatatcgccgctcgggttgcctgaggtgaaccggcagtggcaagtgaacggcagctacggacaaatggatgagtgaaagtatcaaagagagagtcatcgtacctgcgctagtgaaagtatcgtatcaacaagccttcggtcgtggatgtgaaccatcggccgaagaggcagggttaccgacccgaacgatcgatactccgaacgatcccatgaccaccgtgacgagccaggaggaggcggatcgatctgctgatgatggcttatcagggcccgatcgaccgaaacactttaccgcgcaaagtgacaagcccttatttccgagcaataacaggcgacacggagacaacggcagaagacacagaggagattaaatccgcaaacgaaccgaccgagccttgcctgtcatccgtgacccgcgagactcgttcccgattgggtcttcgggcccggtatcctcatcgtcttggtatcttctcggcggtcagatgtgtggtcatcccacctgaccccaagcaccgagcggcaagatccccgtggatctggggtaaaacacccgccgatcccgagatcatcgtcctcgtcctcgtgtgattgcggggcaaaactcaaaaacaaagagaaaccttgcaactattcgattcccatctctggtctaacttgaattcgtctaaaacctgtctcgcctcgtcttcgatcgcccaagattatgcgaaacgatccttttgctccttctagccaatcaatatcgagccccacgcgggaggtcgacgccatggaaaagcaatcactcggttcctcgaaaacaggcacaagtagtttttacgcagagagagacagagagagcccaaacgtcgagggaagcgaataggtggatcccaatagtgacgcccccgccgagcaagtcgagatggcgaaccggggagacgtcaaaacgatctctcacggctccgaccaaccgatatcgccgaaaacagccgcgttcgcggaagctgcttcactgtggagctgggaatccattcgccgaaacgttgattcccgtgcctcgtgtagtttttccgggcataagtcgacgtgtacatgtccgtgaaaccacagtcgtccatccgatgtcggattcccaaatcgtcgaggttcgggcagaccagcagggtttccatcggcgaacgtgtcgaccgggcaacacatggcaacacgttaccgctggagtagctagaccgcgtacaaacacattgcacgtcgactttgacaatgacatggacatggacatcaacgtcgactcgaagtcaccctggtgtacagcagctcaatgtatgatcggacgatgacgatcgaatggctgagctcgatacgccgatcaaggattaggtttcggagccatccatagatgaagcattttattaacggtgaccgccccgctcaggtccacttggacgccctcggccacgccttatcacactggtcgcaagacacaaacatgcgtgctgtgcatacgcgaacgcaaacgcatcgggcatctggtgagccgacagagcggacggacggatcacactgccgagtgttcggctgggagtactttgcagcacgcgtcacgaccatctcttttcgttatctcaactatacagacttgtgcgacgactaagctcaggcggtttgggcgagatacttttcgacctcctccttgagtttctcctgcgagcgggagataagcagtggagcgatacaaacgcgagcggatgatgatggaccgcggcgagacaatcacgtcccgcgagaggagaggaacgcgccggagattagattgttccgaagtccgagtgacggtgacgtcgacgtcgacatttggtttgtaccgcgaattgcgatgccgggcgggttgatgcaaagataacgaggtagtagagtggtgttagctcgccaatacgactcgccgaccaatcgcgcagacgttgtctctagtcgatggtccattcggcagcgcaaaatctcaactcacgggcttcgtcatgctcgaccatcttccaacgacctcaccctttcggtcgacgaggaacttttcgaaattccctatagatacaatgaccgcgaaccgtaatcatccgtacgacatgaaaatgattgtggatcaggtccgtcagtactttggcatattgaaccgagtagatgccaccgccaatggcgcgctcggtcgcagttcccaagcccaggtgatcgaaaacctccggtcggatttcgatcccgcagaaggcaaagtcagactcacacttgaccacgctcgtgcccatcaaccctttaccttgctcttgctgcttcaaccaggcgaaaatcgagttttgtttgggcccgttgacgtcgctctaaagggagatggcggggtcagcgcgtgtgtcttgtcattagaatgcgcccttggctgcggcgctttacctttttgaccagcttgaagtcgactccgtggttcaattgacagaactgatggtcgtaacgatgtttgatcaggtgcggcttgtcgacgacagagtcctggtgctcgaactgggcttacgctggcaatgtcttcgtcagaaccaggttcctgtgtagtgagtggaacgggcagaatcgatcagcatgtcgttcacagtttcgcagagtcgggaagccaaaacgacgactggaaaatggaaggcgcttgacaagggggtacccattgcgcaagatggaattcgcaaagagatatgggttttcccgccgcgcaccgactgtcatcgcaccgtcttctcgggggtgctaatgaagctcgacgtttctcggccgagactggctgcaagtcggtgcctccatgcggaaccacgttgcccggtatcaagtggataaaaggtgctgcatccccgtcccgcctcgaggtagcacgagctcttccgtctcccaagttgaggtcgaagttggtgctcggtatctggtgaacaacggcggggaccttgactgctcgatcaaaggcagacggttgcgctccgacaaagttccctggcaagttgaacgcttgtttacagtcaaggctggcaatgacgaatggtcctaaccccgtctgaccgactttcagcttccccacgccggatccccacttcggcatgtgcttgagagcatctcagctcgacgatatcaagggaagccagactgcacccccgagacgtgtccgacacgggtcgtcgcacgggatcactgctgcggctccaggtgtttgacgctagccagcccctggtcgtccttccaccgatcccgtcgattgtcgaccaccgaaagtgtacccgagcgaccgagagcaagacttacctgtccaccgaactgatcacacgggaaaccgagcacgacgagcccttgatccttgtactccttgtgcaacgcctggagggccgtgtactgcgcgggattgggatgaacgacggggtagaggaaagcggttcgtcgtcagggaattccagccagtttggaaggatctttgccatggttgtataagaagggttgcttacttgaggagtgaaaccgctattcgcccatcaaagagacgtgaaccgtagactagatcagcgagcgagcgcctagcagggattgggaatggcaaagcactcggcggactgaccatttggaagcggtattgacgatcaagacggccttgtccttgtagtccgcctgacgattaccacgatcgagcatgacccggcatcaacgtctgatgcgaaacccctgtcgcgtccctttcctctcgccgccgagactgaccatcttcagcgacttgccacccggaagctcagcttcgaggtcgtaaaaccctttagtcttgacgtcctggggcaaatcttcgtagcccagcttattccagatccatccctggccttgggcggcggcggcgggaggctcttgttgttgttgttgttgatcggacatgttgttgatttggcgaaaagtcgtacgagagagtgttcgatgggtcaagagacgtggggatgtgatggtacggagagcggtacgggacaatgacatgtgatggaaggtttgtatacaagtccgaccaggtcgtggatgatatacgatacgatgcacgatgcgagtgtcggatcgcgatgatgatgacttttgatgatcaatccaaaagaagaagaggatcaacgacgcgggatcaatcaaaagggaaacacgaggagatgggtcaattacttccgagataaccggatcggtcgccggaccgggaaaccatgttccgtaaagcaagcgaatcacgtaatcactatcaatcatgacccgcttcatgagtgatgacgtgtattctttgttttggcatttgctcacgtcatcataggagatgttgacaaccaagtcgaataagtcgagtgaggggggtcatcatttcgactaccttaccagtcccatcggaaatgcgctccataaccaatcacaatcacctccactgcacgactacgacttgctattcaataacaccaactacgcctaccatgctcacctcgctgcgatcaccccgagcgatgcgccccatgactcacttttccggtgcatcccgtacgctgttcaactttagctggtggtcaggcggggacaaagacaaggacgtcagcaaggtcgggatcaatccggtaatctgctccattcaccgcactgaaatcgacgctgatccctctccttgatctgtcgtgtgatataggtggagaagcacgaacaggaccaccctatgacctcgtcgtcgccgtctccatcgaccaagcccagcccatccgatccctctacctcttcctcatcaccggactcgccagcatcttcgactcgacctcctgaatccccagcagagacgatcgccgagcgagaagcccgcgccatccaatccctcttggacagggacggcgggaatgctgggttcgggtacgaagacggcgctccagagggtggacagaggaggagcgtcaagcgggagatgtttagggtgatctaggtgtcgtcgtttagacatcggattttgacatgcccgcggaataattcttccgaggtgtgaagcgacattacttgttattactactgccactactgtatccactagccaccaatacgtcatctacgctccagatgacatgaccgcttgacgtgttcgcattcgagatcttcccctagatcgctcgtcatctagcatgccgctactcgccggaatcaagtcgtcgtgctagaacgctattcgacggcgtctttgaataggggattgcgccacctcatgaaacgctatctagataaaggaggggtcgagttcctgtatgccgcatcgatgagacgcgactcgaagggcaacaaggtcgagaagcaagggtcatctatattacaggcctctcgctctgaatctgcctgagatgatgtcgaggtcaacagtttgtgccgaacatcgatctcgttcccccaccttccaaaccatcttcttcttgtgaatccgtacagatccaggatatcaacggaccatatccgacggcagcgacgaacatggccgatcccgaatgcaacgatcctatcgatgtctcccttgtgcctaccgactacgaacggatggccaagaggggggtcttccctttctggcgggttcgaagggacaaacatcacgacgagtgccggatgagcagggagtgtcgctgaggccgaaacgcgcttgaggagatgaggttttgaggtgacatgcgttgtgttctatactatgcgatttgctctcggggttccaatttacaactttcttcctgttgacgctctggctgccttctatcgtcccctgaaacaatctactcgcaagcttgattcgttcaacacgttgtgcgactctaggaattgtctctatcagagcaggtgcagcgaggcagaaagctgataccaagagcagggcaaaaggcacaagagcgaatcctcttttttacacagatcaattttggccgcgccgaagaatcgattgtacccaataacacgttcacaccctgaccaagataccaccgaggtgctctgaaccaccgtagcttgacaggactacttgtgtcatcggcgcatgacagtgttccgtgccgtttcatccgcgcgcagcctttgtttggtgggacaaggcaagacgaccgagagggaagaaaggagagcctgaggaaagccgggtagccgttggtggtcaaggacttttcgaatatagatagcatgtctcttttgtatgtcagcccgaaataccacagccaaccacacgacagcgtcaaaggagaggatacgcatccattgttgccctacaatcgaatctgcgctatcgatcgaggtcagcatggtggatagctcggtcgataacactgcacgagataatactagtacatataagccagatcggaagcgacgattatcagtcgatcataagcgcattggaaccgcgaaacacgaaccgcagcctcaaaccaaacaccacgtccttcgcacctttccatcgcgacatgtcatccaagtcaatcgacctcgaccagctagcctacgaattcatggccagtgaaaattcgctgaacgggaccgctgactctggtaatcaatcgacgttggcgccatcgactactgtccaatctcaccagtctacacagtctgggcagagcacggcggcacctgcaccgtccacccaaaggcgtaatcaggaaaacgatccgatcgagcatattgatcctcgtgatacgacatacggacccgccgtcactgagcgccgagattccggtgtggaatgaaaggccgggttcggaactagttcttgaaacgcacggtcgcatgtccgtacctgaatagcgttgccaagtatcacaattcaggtcgttttgttgcatatcgaatcgtgttgccttgacgcgacctggtcttagaacgagggtgcaccacatacgtcattctgcgctgagataagatatgaacatagccgccagacgtttatgcgtcagccgagcacttatcacgtcagttcgttgctaggcatcatccgacgacattgttaccaaaggaatggctcgacgtacaatcacgtcaatcttgcgtgttatttcgcctaaaatgctgttgaaaggaaggtctgttgacaagacttccctgggagcggtcatataaaagtcttggattcttcgacagatctcgctgtaattgttgacgccgacgaccgacaacaaaccccatccacctctcatcgatcgttaataccggccacacatcccttcatcatgcccaactcttcccctctattcatcggggttcaggaaaaagcgccaaggtcgatcgacaagcacgggtcgtacgagtttcttcccagtgtatccggacagtgtgacgagaaatcgtccctcgatctcgacctcgagcgaggcgatctcgaatgcgtggtgatcgcgaaggattcgacaccgacgagtcctcccaagcggcctattgagctaggctggcaaaacgaaggtcgattgagcaggcctgacaactggctatctgccatcatttacgctctggcagaggctttgatcgatagtttcaccgggtcaaagggtggattgtagaagcgggcagtcgtgccggtgctccgacgtgtctctgcaaacaaatcgcgagaggacgacggatgtagcctccttgaaagacccgcacttacacggctcacgatcagatctgaatgtactatctctgtagctgtatctacctagatgaccggcgaccgaaagcatatgacaagatgacggtccatatatacttatttcttggctgtttgccacttcggaaccaatttttggttccgaactttgtttatcaagtcgaggacgagctgatcacgaaaaggtcaatttgatcttaaacaactgcatctatgaacccatcaacaccgtcttatcgactctttcgaaagacgacaatgtctgcggtgatgatcgggaggacttgctaaacctattctgtacccacggcgcacttgaccggcaagaaaaacgcactccgatcgccacactgcaggaccgacctcgacgcgatcaatctcgctactcctcctttactttacacatttcccttgcgtcctcgtcgtgtcgccatgaagtcgatctttcagcggcttcggcacaaggacagatccgtatcgtctgcctcggaaaaggagaacgatgagcccgcgcaatctcggtcgacagaaagggcgtccgtcaaatcacctaaaccggcacgacggttctccaggcaggaaccgaccaaggacgatgtaccccaacgacccaaaggtggtgggttcgccgagatgtggtcagggaccttgtctaggactcaggcaaaagagatctctgcctctagaatgggtcaggacctatctcgaacgcagaccgccatgtccgggaccgagtcggaacggatcagccctgtcatgctagagaccacgcccaatcccgcccgtccgactactccattttccatggaaccgattcatcctcagacctctgacgactacgcggccacgctttctcctatcgagtctaacgactatgctcagatgcttcgcacgaccgccgaggagcatacgacagcgccttccggtccgatcaaacgggtagcctttgtctcaccggtgcgaactcccgctacgagcatcgccctcgactcgatcgcctgcgacaaggtcgagcctgctgacaccaatttgccacccgcgacgaccagccgaccggaggaaaaggcagagtcatctcgcaatgccatgatgcgtgccaaaaacgtctttcgatcgcgtgacaagttgagagcggatggcgatgccgctggagcctcaaaccctactggagattcgacgacgaacgcttgcacggcgacatccagtgccaacccacgcagccggatcgcgaagaaaggattagccccacccaacctggtgaccccgcttgccaaaccccgtttcacctcgcgcttgtcacaccgtcgagccgagaccgccgatggaccgcttctccctacgccgagttccagctcgagcatgactccccctacctcgtccttgcaatcccctagcacgacctcttccatcgcttcccaatcccggcttcgagcgaggacgactcctggaatcgagaccggcgggttggatcacgccaggttttgtgcggtcaggcagagctggagcgagatcaccgaggaggatttggtccagaatcttagtcctagggaacggacccggcaagaagtcttgtgggagattgtcagtagtgaggatcggtaagtcgtggtcgtgcggggcatgcacaacggaaccgaattgacgacgtcttggatttcaacaccaacagttacgtgaccgaactctgccgactcaaaagcacctttatcgactcactgctcccgccatcgaccgacgagccacccgtcatcccgtcattctcgtcacccatcggatctccccgttcagactcggtaccatcgctccattcctacatggccaacaacctccatcgatccaagtcacccagctacagctctaccatctcgccaccttcatcgagcgggggcacgatcaacgacgactgtgaaaacttgcccatcgctgcgagatatgcgagtccgacgatgatgaatcacgccactatcggatccggtagagactttccgggaagcgtgtcttctcgccaacggggcggatcaatggacacgaccaacacggccatgtcggatcatacccggagcgactccaccgggctcgaacagtccgagatgaacgacgagacgatcaggatcaagccaaaggggaaatacttggcactctcaaacggccgtccatccgaccaggagacggcgaacggcaggtcgcaccattctctgcctcctccaccaaggggcaaatcgtatgggctatccaacatgctcaatcagccgttctcgtcaaagcactctaggttcatactgagaccggccggcaaggcggacgatgtcgaccctccgagacccagcacggcggattcgtctgcaaagccaaacaagctgcacaaacaccggcagaggatgccttccgcttcgtctggaatggatgcgggacactacgacgagcccttagagctgcccgaggatctcgcgatcgttctcgatgttctaggtaaaggcgtcttggacggtcatctgaacctcgccaaccagttgagaaagaggtacgacgaccaatatcctctagtccggtcgttgaccgacatctttatcgccaacgtgagtcgaatcgtcggccgagtttagatccggagatttgttgacactgtgtattcccgcctacaggcttcggttttgaatcagtacgccatctacgtgcttcatctggagaaggcgctgcaacaggtcgagtctgccgtgctcgctgctgaagccgccaataaaaagtcggacaagggtctcgttcctgatgacatccggctgggacgatatctactggtaagcgacggtccatccagcgtcgtcactacaagagctgtcgctgatgtctgctgtaatcatctcaaagagcctggaagagaccgcgagcgatcgaggagaaagcggactgatcatctctctcagcaaaccgtttcagaggctgttaaagtacccgttactattccaaaacctcttgtttgtgagcatgacccggtctgttccggctgccgagtcaaagctcatgcccgtacactgcctcagcacaccgacgcgaccagtcacgagttcgacggtaccatggtgatcctggaacaggtcgatagtatcgttcgacgcatcgaagacgaaaagtcgtcgcaagaggagaggcaaaagaccagggacgccatcgctcgcgtggaaggattggaaaatgacaaggtcagtcggcgacacgatgcgagtgcaatctgcttcgttactcatcaacaggacgacgccgctgccacagctccttgccgtgcccaagccgtctcgaatctacgtcgaggaacatcgatacagtccccctaccacactgccctcgagcccgagccgcagcagtgtccgccgtagatcgcgggaagattccggtcaacgtcgaagctttaagcgtctgagtgacttgatgaggcacgaagaaaaggagaactgggtggtgtaagtctgactttgttctcgcgatcgggcgccgtacaaaaaccctgaccgtgggtgtttgacagggtcttttcggatgtctcgctgctgtgccaaaagaccgggacgaccaaccttcctgtaggccatcagtcttccaagcaagatggagaaggcaaggggcggcaggctacgatcggacgtaagagtcgacaaattacccctcgtaacctatacaaggtgggtcaaacgactcaagtcgacgattgaaccacgatttgatgctgatcctgatggtatttggaattccagtttgtcaaggttctcgaatggcacgtctcgtctgaagccatcttttcgaacggaatgtaagtattcgagcctgcattgcgatggagcgatcgagctgacatgagttggtctcgcgctcacaggaccgatatgcaagagtgagtccgctctacgacgaggtctggcgtgtcacatcgacttaccgctcgtctcccaacttttgcagcatcagctattcacgttcagcttcctttggcctctctcctacggcttctaggaccgacaacacgaacacgagcacccatgtatccatcaaagaacacgaaaacgaagacggcgacgataacgacgacgaccataatgagcatgtacacgaaccaggcccaaacgctaatcataatgaccaagaccaagaccaaaactacggacacaaacacgaccacgaacgagacgacgttgatgacgagctggcacctttcgaggggagcgattcggacgacagtgaaggcgccatgtcgctcattttcggcaacatgacacgacccgctcgacccacctcgatggacggcggggttgggacgacgacgaggcgacccagacgagaaggccggttttcgatggggcccgcgccggcagaagacggcgacgtggtggacacctctatacggcctgctcctggtcggatcacgagtccgagcgggagccctaccaagcggaccgcaaggacgacggggagcgggatgaaaggcgcctctcacgatcggaatggaaccttgagcggacccggaagaggatcatcctcgatcgctagaccgatgagcaggttgtccacccgaactcgagttggatccacagcggaatcttctcgtcccgtcggtcgagccaggccgaataacctgagcatgtcgatcaatacggatcgccagcaagccaagtttgccgggaggttgaggtttccccaaggacacggcggtgaggacagagccagcctgatctcgcccaccactccgaccaggatggcgactccgaacgaaaggtcgacggtcaagaccaagcaagctgtcggagacgccacatcggtgcggtcgggacagggcggagtgggcagaagagagaggcaagagaagggcaaggccttggtccttccgaaagctcccggcggtcgtatctagccgggggacgaccattagtgatgtgtgcacttttcctttaattcgagtcgaacgatatatgacggtcttccttttttttcccgataatgacgacaattcatgtagtagagctttgtcgtaccatgatttaccttataccagtatgctatatgggctgggtagtcttctgaacctattcgacatggtcatcgctgttgtcaaccaacgatatgcatgtccccgactcggacgactgtgttcggcgtttgtcaagtaaccggttccccggagcgacaccttgacgtctttcacaaaaggtcgaaacgttcgattgatgtacgtctttacataggccacctcgaacttacctcacaagcttcccataatgtcctctcaaatgcaactacaaatccctggatccaaaaacatccaggcaaccgtgccttccaaaggtctcgtcctgcttcgtctgaaccggtcagtcactgcgcgaacgggcaaggccgacatcgagggagattgtttctgacgtcaacctcgtgtacctgttcctcacctgctagtggccctgtcaacgctttcaatgagccgtgtgtaatttcgaaggagtagcaaaaatgcaaatcggactgacgtatccgtcgtatcaggtactggcgagagctccaccggactttcgactacctctcttcccacccagaagtccggtgcattgtcctttccagcgttttcgacaagctgttcactgccgggcttgaccgtgagctctagacttgtcgtacccccgtgctgagcatgttgatcatctatcgtccgccggatagtgaacgacaccgacaccctgtccggaggagccgacctggatgcaggcaggaagggttacatcctccatcatcacatcagggtgcggagcatggacgatggcgtctgcagtaaatcctcactgactatatggacgtacaccttgtgacaggactttcaagatgccatcacttcgatcgaaaagtgtcacaagcccgtcatcgccgccatcaatggactttgtctcggtctaggtgggtcgtttaggattcgtcacatcgattcaagctgggctgatttcgagtcgacaacactcatccgtactgttcgcaggagtcgacattaccagtgcttgtgacgtccggctggcttccgagtcggccatctttggtatcctggttagtacctcgagttggacacaaccggctcttctcgagtctcacgcttcaccacgtccgacccgatgttaggaagtcgacgtcggtctcgcagcggatatcggcacgctccagcgtttccccaagatcgtcaactcggactcgctcgcacgggaactatgctacaccggccggaaattcggagccatcgaggccgaatcgatgggtttcgtcagtcgggtcgtccctggtgggctaaaaggtgtcgaggacgaggccattaggatgggcaagttgatcgcgagcaagagtcctatcgccgtattgggaaccaagaatatcctgaactgtgagtctcgcgatgggcattcaccgtcgatgcttgcgccagctgacgatcaggataatgaattagactcgagagatcattcgtgagttttcctgccgaggagctggagttgtcgagttgctgatcggtcgtccgtccagcgtcgatgacggtctcaactataccgccgcctggaacatgtaggaaccgcccattttattgctcgggtctcgcacatgacgctgacctgtttgttttcctcgttgtagggcaatgctgcagaccgacgtgagccgtacagtgactcgaaagcgtgaccgagggctacattgacagactcatctgctcgcaggacatgacccgagccttgcagaatttcaaggacaagggcaaaggcgcgagctactctgacatgccgaaagtgctcgccaagctgtagcctatgttgagcgaattcgaaagagacgccgtcaacggttcgcgaggttatttgaatcaaagcaaggcaaagcagcagttgtacgacacgaaccgacagaaacgtatgaaagatgaatcgatcgccattcaacctacactgcatgtagtggggtggcacggatctgtttgtagtcgagaactggtcactagttgatcccctgtccgaggagagctcttgcagtcgaaatctgcccatctactacgatatgtataatccgcctttgtacgatcacaacaacaaaagacagcgcgactcccactctataaaaggacccgcccggcggcactcgacgtcaaggtcttgctcggcaagacgatacagctgggagaaatgagcgacgtcaatgagcacgggcatcttgactctgacgcgttccgactagcggactcacgatcgaatgacggtctctttggcaacggtgacattggtagctatagggtagtcgagtccaaatgatcagccaccgtcccccaactgcttctctgtccgggcgaatacttgcccaagatggtgatatccagctttttaccatctccatccatggccgcgggttcaccgtcgatccggctccactgaccgatcttgcagtccttgccgacgatggcgttttgcacacaggcgtgtttctatcaagcgggtcgtcgtttgaattaggtcgtgcgaggtagtatcgccaatgtgcacctgacactcacgtcgacaaaggctccttccatgaggatagcgtccttgactcgagctccggcagcgatcctgacggcggggcctgtacagaagagcgtcccccgctatatcagccacgatcggcgatactcacgagccgacacgctgggacacccacctagcgacacgttgggaccgatcttggccgactcgtcgacctcggctgtgggatcgataaagaccgggggcaagatcgtgggcccggtgctaccaggtttgcccggctgggtcaacagtttggaattcgtcttttggaattgagcgaggtagagcgccgaagcgggcacggcggatccggctgtcttaatctgacgccaaaagtcggtagattcgtatacgaacatcttgcggctggcggcgagagggacgatgacgtcttgttccaatcggaggaggtcgtcttgctcgccgaatgggtcctcgctgagggggtacgggggcatgtcgtaaggacaagcacggcagcgaaacgacccggaccgactacgtacgctgcatccttttgcttgttctccatggccgtctttacctcgtcaaagaacgacttgtcaaagactgtccgcccgtggaccccccatagtcgatcagctctgagcacacgctcctgactgcgctgcgggactcacggtagatcccgccgttgatcaagtttgagatccatttctctggcttttcgacatagtgcaagacttgggacgaagaggggtcgtgcacgatacatccatatttggtagccgtctcgggcgagacctttcggggcgggtgcgcgggagagtcagctttcgatgattcatcgcgagggaactcgtgtagagacttctcctcacgttgacacccatgatggtcccgacgcctcggtgtttcgaatgcaagtcggtcagctgctcgagggggaagctcgaacagatgtcggcgttgatgacaaagaactctttgaggttgggaagaatggcatcacggactgtgacgcggaaagttagtcggagagtcgctggagggaggtggttcgacgactactcacagtggtacagccctccggcggtccctaatgctcggtattccctcaagtacctgagagggtgcggtggtcagcttgaacctcgccatcctgcagctgtcctggcgccatactgacgtgatggacaatcccgggaattccctctttgcctgcttgatgaaatcggcgaacaaggcgtcctcgtagaatccaatgatgacgacctcggtcagtcccttgatcttggacagggcgagcaaggggtggtagatcatgggctgtgaattgggggaagcgtgtcagtgcttgatagggctggctaccacctcgattgatataggatcgacacggaaactgaccttgccggcgatggggagtagaggcttgggggtgtccagggtgagaggacgcatcctcgtacctgcaagtcgtgagcgtttagcatctggagcagccctaagcgtggtttccctcgccgtcatctactcgcccttggttccacctccagcgagaatgatggctttggttgcggacatggttcgattcgatcgtatagaatactatgtggcttgagctataacgtctgaagatatgtacccagtctggttacaggattacattattgaacaagtggtcgtgctattgcgtttttggctcgaacgtgtcgtcgatggagagcgaggttcgccaactcgggcacggccggaagcggaaacaaaaacaaagattagggatattcttgttgggatgaatggtattcgttcaaggagagacaatgatatcgacgagtgacaacagtttcgaatatgagcatcgagggttgatagttgaagtgcaacctgtgctagataggacttgcatggcgtcgacatcatggcattaggacggtagataccgggggggggtgattacgtcgagcaaaaagattgaccagcatgagggtcgaactcatgacctttcgtttacatctagacgatattagacgaatgctctaaccaactgagctagccggccagtcatgaaaagggaatctatgttaaaaatatatccagaatatgctttatcacacgtgagtgagccaccgtctgcccactttgacggccgtctctcgtccccttatcagcccttttgaatgtgtacgatcgccatcgagtcgctgactccctgatgatacacgctagctgaatgctctatatcgtccttcgagctgacaaaaaactccaccgtagggttctactctacgtcggacccggagttacccgctctgcgctgcttcacggccgcgtcttcatcgaacccggactctgccatagattgcgacttgacagacgttattttgatgacccgtcggtatcataccgcccacgccaaccatgttgacctttgacctggcaccccgcctcgaagtaaccagatttggtgccgttcggcatcgggtctcgtgcggccaggctcgaatctgaacctaagctcggagtcaccgcgacgtagggtgtacaagctagtcgtgaacattaaagactttcaagaataagggtacatcgaaagcatggcctgagccgaaacgagacccgccaggaatcccttgtttatcccaaaatcaaaaataccaggagagtaatgtccacacgaaagattcgcgaaatgattgcgagtcgagagctagctttatgtgcgcatcttccgggtcgctcgaccgatccgatcttcccttagagcagagcagagacgacgacgatcaacgccagcgctgcggtcgacggaccagcgaccttgaatcccgagttggcaggtgcactggtagcagtgccgcttccgctggaagtgacagatccggttcgtgccgaggtcatggccatggtcccagatcggatcgagctcgctacagactggatggagctggcggcggccctggatgctccagtcgaaagggtgacaatggccgtcgacgagccacctgtgcggataccaggcggtcaatcaatctcatgcaggcttggagaaacttgtcgacgcgagactcaccagcgctgacgacgactccgctgctagctcccgcagtgctcacggtagctcccccggtgttggtaagggtcggtgctacgtatccatcctgaccggttggcgagggcaaagcctgggtggactcgggaatcgactgcaatacgacgtcgagcaaggtattgtcagcgagccgtctgacaagacaagccgggctcgagtctactcacagtgtagttctggttgacgcaggagttcttgagctcgttgtaatcagtaacctgggtctggccgacattgttgtttcgctgcagtgttgcccttttcagtctctactgtgcaaagtgcctcaaacctacccgatactcacagtgttacacgacgcacagttgaagatattttgcaagtagtcttctccgcactgacaatcgacgtcggtactggcacacgtatcgaagctacactcgaaagcacaactcttggcggctccctggcaatactggggcaaggcggcgaggacggatccgagcgtatcagaggtgttttcgtccaggcatccggcgcaagaggtgagctcggaggctgcagggatccccgaacagaagcaggcggcgatggacatcgagacgttgccgtactcttgctacagacgggcgaaaagagcgaagcgaccggtgagtcgggtcgcacaacggtttggacagctgacgaacgcagacttacggcacagagaacggccgtctcgatggtggaagcgcattgggtaccacaagcagcagggatctgtaacaccgtatggaacgctacgtgagctggaattgcgggagagcgtgcggaacgggtagaccacccactgccgagacgtcggggatcccgccggtctgcgcgttgatggcactgaaggaagccagggcgatggtggcgatgagaggtctgtacatcgtggtggagcgagagtgcgtaggtaggtggatgaagagatacagtggattggtgctgtagcgagcgtgcagatgtagtcgaacaatggcagatgtctatggttccaagatcgtcaaaattgattggggaaccatactactttttagcaacccagcacttgaaagtatcatcatgttgttattgctcgaacgggacgctgttaccaaaagattccgagactgttttttttatcctcggcccttctggttgtcgaccctctgtcgtcgtagatcaagcagttagttgcaagatagctgacagtcgaccagtcctcggaagtatactacatcgtcgccgttggaccgagccgaggagaaaagaaggtaagaagaagaagaaagctgaaagagttttaaccgctgggatcagttgccttcctcactgctctcgctgctcgatccgccttgaaccttattttgatttccggaatcatattctttagccaaacgccattcacgtgccttttcggaaggattgtcgtgagaaaagtgaccagccattcgcaagcaaaaagaaggtccgcttgacatcacgtgacttgatccttcttgtcgttgtctggtctagctatgggcagaggtttgaccggcagcatccgatggccgacggagaatatcctttagcgactcgcagtggtggatggcgggttcgactccggcttttgcgcgacgagatacctcacacaaacgctaatcctgttctactcaccgaaacaaaagtcaagacggctgacatgcggggatcaaaagatggctttgacagaaactcgagctgggaatcgcaaagtgctggttctgcaacgacatgcgactcggtgcccgaacatccttcgatttgcacgtcgtcatggctgttcgccaagtcagggatcgggatctgtgttcacggcgatgatctgcatcaccggcgcagaaccaggtctcacacttcggaaagctcgcgagattcggctgttgtctggccgaccagaatcggtagaaaagttctgcgacgactgcataggcgacctcggaccccgaatagaattgtgctgagcggtgccgagacgagccggctggacagaccggtgtgaaccaaatggtagaaagatgaaatcaccagcgacgaggccagccacccggtttcgaagcctgcttctaattgtacgggaatgacgaccaggtttcggcttgacaaaccccggaccgatttccagccaccttggcagccccaagagccgatgtcccgacgtcttgtcaagaaataacggtgtcgactagaattcatttcgatgacgagtaacatttgcaaacctctacgcagaatccttccacctcgatcctcctatacctcctcctgtcagaccagaccctcttgagtaccttgtcgactcgatccgaccgcttcgctgaagagatgactttccgaggcgaggcgtatgacgaacatcgaaagggacgatccgcctagtacccgctgtccctgaggtattttgcgagcttggcgaggacgacgttggcatcccctacgatgacgggagggtcatactacgaccgaggcgacagcgaagacggtggtgtgatcagcgttctggcggatctcggccgtacctgtgagctcccgcagactcacctcggcaacgaggatggcctgcttggtcttcatgacgatacatcccttttcctgtatgccgtccatccgcgccgacagcaaattcaaacgagcaatgagaatccaatcgagtcagctccccagttgctctcggatgtatggtatgacacgataacatagcgccctggccgaactcacgccttttcgtccgagcagctcttcgtcggtcgcctggagacacatgtacttgattccggcgagggtgataccatgggctatgtgatgacatcaattcaggtcgaggtcgagcgagtcgtcgatgggcattgttgcgtccagtatcgagagaaaggttggacgtcaggccgggtatgagcgggtatgcgcaaggtttgatgcgagagacaaggtcgggtgtggaaagcgtcgaatagtacgtgttcgccgaccaggagtgacaatgacgtgcgggtatcaagttcaaaaaaacggatcagttccgaattctggatcaaacgccagctttgatcgagtttgccaacgatgcatctcggtcaaggcgcggccaagatccagatcatcactcaccctgagcctcccctggctggttgaaagcggtctttacgagaaagtcctgctcgggctttgagagctatgcttgccgaagatcgaaacgggttgtaccgagcagacaagtaagaggatgaagacgaggatgatcatgaacagaacgagttgatctcagctcctatcgacgagaatgatactgttcgtccccttgacctcatcaggtgactcacggtgtatcctgccgaggtagcccatacacctcctttctgaccgataatggctcctcgagcgatctggcccgatcccaacatgctagagtcgacgtaagctgtgcggtgggggcgggcagacgtcaatgacagtgctctccagggatcaacaggatcgacctcggggctcaccttgccaagacattattgatgattatatagtatgtgtatttgtgcgtctgcgtgttcgtcaagttttcgttgcgagtgatcaagagaagaggtacgaagagatgatatgtgttgcatgtgttgggtgatgtggtgatgatgaacttgatctgatctgagatgatgtcgctccccttctgccgcgtcataagctgggacaggtgaggtggtacttttcagcaaagagatacgagtcacccacccactcctcgcatttaatcgagcttcacctattccaaacagcaatcaccagtcaaacagggcaaggtaagcatcgaagtaaaatcgatcgtatctgtgcaaagcggattgatacaacgagaaaacagaacacagagaggtaaagttgtacagtacgacacgtccccatacccccatctaatgctgttcggccaccatgacctctaccggaaaaaatggccccggccagataaagtcagctcttatcatgtctgcgaccgggctcctactcactctttctctcggccgtgggtttcgtaagcccctcccgcgtatgtcgtctccggttgtcgtccttggtctttctcgcgtccagcatggtctttttgagcgccgccgcgttcttgatgttggaagggagacgtcgttgcctggaggaaggacaagacgagacgaaagccgcgaaccgtgatcaggatcgcaccgcaaaggcggacgcagacggcagagatcgtgtgggacatacctctcgatctcccggacacccttctcgttgccccatttttctcgcagcttgcgtcgatattccatcgattgtctctccctcgtatcgatcggtcccaatttggcagacgcgttggtcttccagattctacgcacaaatggaccgcaatcacgtgtcgatgtcagtgaccccgtctgctcatgcgataagcctgccgacttgaacccacctgacattcccgtcgtccgaaccggacaaaacgaaatcggccgtgggcgtatagactgtgtcaaacacccgttgcattcgtttcgtgtggtaggtatccctggaccggccttgatctcggttccagagtcggaccgttcggtcgtacgaacccgagacgaattcctctcccgtgggacctgcaagtcgaacacatggtggtcaatctgctgtcgctatcgtgtgacggtatagccgctttaatgccccgaaccgactcactccaatcgcagctcatgacgccagcaacatgacccttgtaaatctgggtcggggtctccatctttcggagatcaaaggtgtacaggttgtgatcttccgaggcgagcaggaggacggtaggcaacgtcgggttccatgccaacgagttggatttcatctgcaccgacaccacggtcaatcgatggtcctcgtggatgatcgggtgaatctcgttcgactcacgttcatgacgatcctcctctcggccttgcccgtccgaatatcatacaggcacatcgtcctgtcgtttccgatactcgccaagacgctcgtctcggactggttgaacttgaccttggtgacggtctccaacgagtttgagaattgcaagttggagagggcgctggatttcgtcgtatcccagatctggaccgtgttggatgccgtggcaaagatgttgtccgtacggtgatggtcgataccgctgcagagaggcgcgtcatgagcatcatccagaggctatcctgaccgtgggttgaaccaggccaacccgaacgctcacactcacttgaaaccaaatttcccttgatacaccatcagaggctccatcttggcggccgccgcgtccctcttggcctgatccacgatattgagaccaccaccttcctcctcgataaacgcgtcctcgtccatatccaccccgtcaccttctcccaacctcgcctgatcttcatccagcatgccttgacccaactcttgctcgtcggccgccttgtaagcgttcccctcgaatccgccaatgccgtcctcgtccaggtcatcctcattctcgacgacgtgagagaggtgattcgcgatattcgatgtcttccaaagtttgacagtcatgtcataagaggaacacgagaggaggtttcgtttacggtccgaagtgtgcgaggtgaacgttacgcccgagaccattcccttgtgtgcctgagggagtttgagcagcggtcgtcgcaggggcaaagagtggaggatgacctctgccgccgtacatcgtatcgaacacttccagtcagtcggatgttcacttcaagatcacggaccgttcgaccatgtgctcacctccatcaccgcctccaccggctacgacaccgacccgcctaggatctctcgccagacagtacactccgtcttgatgaccttcgatggcgccgacgaaaggtttcgcaaacatcctgtccatcttggcggcggtgacggctcgggtgtactcgcgggtcttggagaaagggtggagagccgggtctaggtttcgttgcagagggtgaggtgccgctgacctgcaagaaaaggtgaggacgcgaggtgaatgagcattcaagtaagacgaaatgaattctacgccgccgtgcttacgaagcgggcagatggtcgtccaaggacctggtgataactttgatcttctgttatggggcgaagggcaagctgcgatcagctctctcgctgtctctcctgccttgtccggctcgatccgaggcgacttcaaggcatctctggacttaccatcttgtgcagggtaatatcacgtgcaagaccaatgcgagagcgataagcgatagacgttttggtagacctatacctgttcgattctctttaaattagacaggttctcagttaataacccccctcggtcgatcaaaacagtcaacctgacaatatttcgtttccccgacaaaagtggaggtcggtatgccgtaactaatctcgcaattcagtggcgcctgccatcaaatgtcaggcccaagccactggcagctggcagcgattcagcacatgacatatctgccttctcagctcaaaactattcattaattcattaacggtcgtctcctttcaaatgacgcgatggagaagctagaaagtagatcgccgtgctacgtccacatgagtatatgtacttgatccaggtgattcgatctgttgatcgataacaggacgtcacccgactagcttgtctgcaacgcccttgtaaacgtcaaaagggatttgactccacgttggacatgagtagctctgaacaatcgaaccgcgatcttgcagatggtcaacccgcatcaactgcattctcgtcgggtagtgttccggagataactgatcagtcggtgatgagcgttgacctacacgccgagacattgaatcctgataacggagtcccgtctacgaggaatgatagtcacttgcaggaagatcggaacgatggcgcgtccgagatcgatcccaataggaccccgccccgtgaagcaaagctgtcggaaagtcagatatcgagggcgatcaagactctacagggcaatatcacgtcattggtcgacagagtcatcgaaattaaagcggatgaagaggtcgacgacaaagtcaacgagaacctaggaaagatcgggagtaccctttacaatatggtctcagtgagcatgtgttgtctgttcttcgcaggccttctaagccgctccggtgcgatcgcattgactgaggaatgggtggcaacgctggagagagtcgttgtagagctcgagggcctgaacaaggaaacgctcagccagtctggagatctgcaaccccaaacgaacagtatcgcgaacgtcgctctcgaattcgataagctctgtcagcaaggtgctaccgtgcaagaaacggaacaaaggggcgatcccgcaaggatcaatggctgcgaagcgaacatgaaatgggtcggcaaggcgatgcgcgacgtgttatgcgccttgggtcaaaaccctgccaaatgggactcctataagcgccagaatgccaaaaatgagatgaatcccactggcggtgcggacgaatgatttggccaatgttcatcgatacttctgcttggccgctccgtcgtgttgttacgcccggatgttgtactctagtccttaccgacattgtactgatgatcgagaataaccatacaattgagtctgaagtcgataggttggaccgactgaagctccgtcacaatctgaatgttgcccagttcctagcatcgccatgccttagctcgaaaaagtagtagaacatgagagcagagacgtagaagtcggcttgaatttcaccagaggtgcgatgctcaccagtactcgtacatgctttctggtagtcagtcaatcgtggtctgcaacccagaagcggtggaaaaccttggtgggttatgcatgtgtacggagcgacagttgccctgatgcggtacacaaatgatctcaggctgaggatgcgccattctgaaggggatggcgaccggaatcgagcctactagctactagaacagctgctcgccgatcgtcgatttcatgaatacgtaatacgcaaatgaaaggagctactttattcgtccttgtcaagtccagtcgcacgcgtccgcatggtagagacgagatccattgcgtgactatcgggcgatgctcacttgaccggcatggtgatcctaattgcgctagatcgcgtcaagtgattctcggccgagatagtaagatcatgatcatcactttgaatcctcgccctcggtatcgccttgctgaatatgtcgtgatatagcatcgtcatgcgcggacaaaggatgcagagcaaatttgaaaggctgacatgctgaacccacatctataaaatggagctacatccaggagatgtctccgaatcttcctcaaggcaggaggacaattacatgtatatcatctatccgcacgatcacaatctcccttctttcatattccaagcgaagatgccagcctctaccaaccacagttcggtagtcacatccagcttgggcccggcaggcagtactgatgagacgagtgaaaccgccgacagaatttcgaaacgtttcgacagtgccgccagtcaactgagcaactccaatatcacggaagaggaacgacacaagaggctcttttcaatctacacagggtgtcaaaagtgcctgatggatgacttctggacgccgttgaaagaacatgccgcattctcgagactcaaagacgttgcgtccaatcctgagcacgaactgacgtctgagcgactcgcaagtttgaaagatgctatggatggtcttctcagaaatctcgaacgattcaaccgccctaaagagctgccaccttctttggactaagttctggaggggttggtagtgacttcggaaaaagcttacgacattgttcttgagattctcgacgatcttgagaaacaatgcgatgagccaaatgcgaaggtggacatctccgtaggaacgtcagcagccaaagagcctcggcttccaaggcatagcaagctcgcattgatggtcgcccagtgtcgatccatatggagcctggaccgcgagagcgggatgcatcacgaagtcatcagcctgaatctcgaaaagttggtatttttcgcggaactttctgtccgagaggtgacccgccactggagtgagagtaccacgctaatggagaaatccttgaactgagcgttagtcgcaacaacaaaccttttagggtgcgcagggatgactcaacctcctcttctttctctgtacagaactgaagtgtcatagctaccgcgcgaaagaggtcatcgaatacccaggtttcatactatggtagcagatgtatagatgtgtatttgctgtcactcgaagagccgactgcagttgcctgatgtgaacatatgcaagcaagtgcgcacaacgtgcaggttgattaccctgatagttataatcgttaaaaggccctttggatactctactatgtcttcccaggggattttcacggagtgactggggattgacctgacggatttaaagaactccctagatatctttcccgaaggatcccttagtcgaaaactcgctatgatcaagcggactccagtcgcaaacgtgcaatgaaaggaagcatctcatccggtcgagacatcaagccatgctgctgaatgagaacatataaagaggatccggggaagctagatgatgcatgatcgtccggatgcattgggcaggaaatactagatcgatagcctttaacatcattttgagctctggcacgtgacaccgatggcacctctcaacaacagcgatcaattcgaagcccgagcttcgtcgagcgtgggggagtcgaatcgcctgggatctatcaagacggagtggcgacaagggatgacacgatttctcgaatcttaccgatccggaactccgtttcagtcttccgggacgaacctatctcacctgatcccccgcactgattcgagggcaccgcagctgtccgccacgatggccaatccggactcccaaataacgctgccctctgctgtgacgcaagacgtccagctggatcttacaggcctctcaatccatgatggagccggtactttcggttctcatgacttacgggcgctccaatgtgatcctaccgcagcacaacacgctccgggctgtggggacgatttgccgccagtaccaccaacgtatgaggaatttctagaagagggtctatacttcgtacatgccagtttcgcaaaggtcccgagccaggcctggttaagcaatcttgctaaagaaatccagacggcatggcctcaggaaatggtcgaatgggctcaatcagggttcgatagctgtttggaacacacgaaccatgtggagcatgccttgttcgatctttttcaaacttgggggcaagattatttttacctgggcaaaggcaaaccattcgtccgaagagtcggtggccgtgtcaacgcggtatgggtgtctatcaaagtccagggagagagtttcgtgaacgggggcgatacagcggagcaaaagcaagcgaacctatcgaatctgatcgactgtttcgatcggtcgcaagatcaactgatgcggcttacaaagggtatacgacagccgggagtatccgcttcgaagatcgagagcataagtgcctgagggtgaagggacgctcatctggagaattacgcaagaccagttcgagggtggttgtttcgaagtaccgactggaacaggatgtgcgtcgatggactgcatctggtggcctttgtctactgttggatcgagtgttttgttaaacctatgatgatagataacgtgtgatttgtgatgtcgtgatttgctacctgtaaaccttaaaatgcacatattcacaaatgatgtggtcgactcgaagtctcggctcaactttgaacttcgggatcatccgtaccaagtcagacgatcgcgatcaaatctatgaagcaaaggagaccgcaagtctaacaatcggcccgaacgctcatcgaaccggacttatctcgctataacctgctgtcttctcagatctcgagatgttggccgctgcgacgacgtccctctttgggaaatcgtcttcgctgtcggcgtacaccatccacacgaccccgacctccactccgagctcgtcgaccttgaacctctcgtccacgccagggcaggcatcgcgacggaaaccactatctgtcggactttggaaagtgctcagcgggactcacaagacgactggcaaggatgtcagcgtttggatctttgagaagcggacgattgatggggtcaggggtccgcagctcaaggagacggtgttcgagacattaaggaaagaggtacaagcggggaattccagcttggccatcttatacaaactcatcttcttgcacgcatccgtacaggcacaatccttaaccaaactacgacacccagatctactgcaaatcaccgaaccactcgaagagacccggtccgagctcacattcgtcaccgaagccatcactggcagccttagcggaattctcaaagatctagccgagaacctgcatggccctggtacagatagtcgaagtcgggggacgtcaggcggcttggaggtggacgaggtcgaggtcagcttatctgtgttgttaatccggttcccgagtgtcaagctgatcggagatggccggtcgaacagatccagaaaggaattctacaagtctcaagagcgctatctttcttgcacaatcaggccaagctcgtccatctgaatatcaacccggatgccatcctcatcaacatcaaggcaagttgctcctcgaccgtgtctctcgctcgctcatcgcccaaccgagctgatcattctcgtccccatcatttatagggagactggaagctctcgggactgacccacatcacacctataccctcgtcctcatcctcggcgactcagcagaaatacgtgtacccggaggtagacagctatatacccagtcaagttcagtggaagttggattacctcgctccagagtatatcatcgatggaccgggaagctggggaaccggggtcgacgtctacagtcgtgagcattcagaagtcatgagcaattagagacgtcgatactgagcggcccgtgctgaaaacctgtccggtagtgggatgtctcctgcatgcggtgcatttgggtggaaaaccgcctttcaagaataacggctcgatccagactgcaacgacgcatttcgagcaggacctgaagcagggaagctggaagggaggaaggcggtggcaagaagcgggtgaagaagtccgaggtgagtctcgagctctggaaaggacagggttgcacgtttcgctgaccttctgcgtcgtccggtggaatccagatctgttgcccaaactcatcacacggcatccccaaccacgtctatcgcttcccacgctccagtctcattcgtacttttcttccttggccatctccaccctcaactttttggacccgtcgaatttcgctagcaaaccgagagaagaaaaggcgtccttcttgaaagggttattgcgggtccttcccggattttcggacagattgaagaggaggaaaatcttgcctagtctgcttgatgaggtcagtgtacacgactacacgactccgtcgtatccggcagtatgggtctgacgcatctctcgtgtccgcagatgaaggacgtctacctattaccttttctcctcccagacgtattcgagatttgcaagaccctgaccaacgaagaattcgctgaagtcttgccacgggttcagcctctctttgatctcaaggactcggctcaaacgatgttgatgctgatcgagagcataccgatgtttgcacaaaagacttcacccgaggtctttagaaagagtgagtgatgaactctagtatactgccaccatcagcgttcattgcgactgatcgttcccctcgcgatctaggcgtgatgcctttaatctaccatgcactcgagtcggagcatgcgaatgttcaagaaaaggtcttgggagccattccctcattgtgtgacaacctggactactcgacattgcaagacattcttttggtcaaagttgcggtgagtttgcaacgaggggttagacgccggtgaaagagattcggcactaattgtcttggttgttcatagattgtattcaccaaaacaacgctgttgtcggtcaaggtcgaaaccctccggtgcttcctggccatggtcaccattctcgacaaggtgagacgggaagcctcgattgacaatctcgaaagatgctgatcgtgcttgtcctttagaccgtcctaacgcagaaattggttccgcttctggccaaaattaggaccaaaggtgagttcgccttcagtaccattctggccactccaaagtcgaggctgatttcccgtcatggcttggctatccacagaaccttcggtcatggtaggtctagatcatacacaatgtccagcctcttgtcgctgattaggcgtttctcgcagatggctacgctcgcggtgcacgaagctatgggaatgaaggtagacagggaggccgtggccggtctggtaagtgattggagcaatccggtatgtttgtgcgagatcgccatttacgcgttcgggcctctcaggttttaccacaattgtgggccatgtccatgggacctcgtaagtgatccagagctttgggcgaatcctggcatgaaattctcaacatcgaggtttaccttgccaacagtgctaaacgttgatcaattcggcaaattcatgaggtcagtctccgcttgaaagggcattagtctgggcatatgctgaagcgcggagccatagcgtgataagatcactgggcaatcgcgtcgaacgggaacacctggaacacctccgagctattcgtcgagcggacgagcagacatcaacttttgccagtgcttctgcgagcgcgaccggatccgggatgaacggaggtggcgaagtcgatttcgaagctttggttggatcgaggagcaatggcaactcaaacggtacaagaggcgtacagggcctttcactcgatgacccctgggaccgcaccgacgattggctggcatcggctccatcaacggttaccgcccaagttcccgccaagtacaccccgactgcctctacgtcgaacgtttcgaccggaggtggtcgtctgaaagcacgtccagtacctttatcgacctttgacgccgctgctttcgccaccaaacccaatacgatgggaccgaacaataacggcgtcgggtccatggctggggtgatgcaaagtacgcccgctttaccgacgtcgcaagtgcagatgtcaagggcacccctttcgccacgtccagctggaccgaattacaacattacacttgcaccgcaagcgcccaccgtgtcggctttcgccaacccatctttctcgaccgcgggcaacaccatgccgatgtcgagaccgatgacgatgaaccctacgcccgtatcagctcctccgccgggatggtccaactctggtaacatgggaatgggcggcgtgttgcagccgacaaggaaggtcgagcagggatcaaacaagaaggcattcaatgattccgattggggagatttcgacccgctcaaatagatgcacgcagactcgagactcgtttgtatcattcactcgcatggttgtatatctcagcatcaggatggataccgtttgatctcaccaagcgcggttgttgggatgtgatttatataattcaccgcgtcgcccaacttgacggcagacctgggcgaaaggctgaatggtcgcccacgtggagctgattgtctgagggcaatgatttcatgacatgatggtaggaattgcatgcgtagcgactttgggtttactctttttttccttggcggggtatatacaactcctggttgggtttctgcttattcgtgttttgtactagacaaccgacacgtcgacgttttgcctaattggccaagggctcctggtcgagccaatcgagaaagtccggggtaaagtaggtcaagatgatgctagcaccggccctcaagaagctccccacggtctcctcggccatcagcctgagatcgtagacgcccttttcggctccggcgtggatcatggcgaactctcccgagacctggtacacggcggtagggtggtccggttgcagcgtggcgcagtcctggatgatatcgaggtagggcaaaccgggcttgaccatcaggatgtcggcaccttccatgacatctcggttctgtcgggaagagacggtggagaagaccaatctggcgtaagctgatgcccgggttccttccggacgccatcgtcaaacactcacgatggctcgacgagcgagacccttggcgaaaggcgggagttggtagcactttcgatctccagccataggagcactaccggcagcttccctgcgtgtgaccaacggatttctcgtcagcgaccaagcgattacccctaaccacacgcgtcgactcgcctgaacggtccatacagtccactagcaaacttggcagagtaactcatgacgccacacctgttggcgtatccgtgctcgatcaacatggtcttgatcgacttgatcctcccgtccatcatgtcactaggggcgacgaggtgtgcaccggctttggcgtaggcgagagcgacttcaccgatcctctttgccgaggccgaggagtcgaggtggggcgctccgttggcatggttggggatggggacaaagacgtccggcttggtcctggccatggggtcgacctttgagtgagccgaggcgggaggagtcatcggggagtcctcgtagagcttgtagtctgatccaaagacgagagggtgggggctttgaggcctgctcgaagagtcatcggcgacgccggccgagaaagtcagagggtgaccgccggccttgtccttgttggcgacggtctgaccgtgcttgagtccgccgagagagtagctcgagggtacgccgcaatgaccatggttggtgtactcgcacaagcagacatcggcggcgaggagcagcttggggaagagcttggtgaggagtttcaaagcttgtacgacgggagtgacatcggagtcggcgtgggtaccgcattcgtcctgtggacaaaaataatgcgaccgtcagtcttaggagttccggaagtggaccaacgtctaccgaccttttcgagctcgacgggaacaccaaataggatgacactcctcaagcccttctctaccaacggcttcaggaaaccctcgagtttgttgattccccatcgtttctgtccaggtaacgacttgatctcgatctcggcatcggggtcgtcggtgatgaagatggggtacatgagcatgtccttgctcaaggtccggcctcgagactggtaagtccggagcagaggatggtggtaacctcccgcgaggatcgagctgcatatgtggacaatatcatcgttgttggtcagcttggaacaggtttagtgaaggagatcgatcggttacgccggatagacactcacgaaatgtcgagataaggttgagacgtctgtagtacggcgatcgtcggtgacaaaccgatgcgagtcagaattcgcccagtcaaacggcatgacaactagtcagattactcaccatggtagtagaatatttctgggatgatatgattaagagctaggtatggttatgagcccggaggaaacaataataacagggaacaagttatcgatgatatacaggttgcaggttgataacatggacgtggagagcgctcgactcgcgactcggtcttatctcgcgtcgcaaagggaaatcgcgcgagatttgaagctcaaactttatatcaacaatatttttgctctaagccatgaccaatcatctgagcgcggttgggacagtggtagtccatcagacttcgatggtctgtttacacaacacgattgagtacatctgggtgtcgtcggttcgatcccggcactgcgctattctttttgctctttttttccgtctttttcccctcaacttcacagcctcttgttgcgtgcgagcgggggcgtcctgaggcgtgcgtacttggttggcttctgtgcgtatggactttgtccgacgctgcaatctttgacctcgaagaccgacagacgtctacaccgtactcgccaagccacccgccatcgccggccagcacgcgccgggagagactgccgcgcctccgactggaaagaggccggctaacggaaggaccaagaagagcaccgggaccgctaccgctgccagcgacgacgaggagtatgaggccgaaggagcgttcgatgaggacgttgacgaggttatcgacactactgaaaagaagaaggcaaggaagaccaaggccaaggccaaggttttggacgtcgaaggtgtcgctgcacagaggaaggccgatttacttctctttgcttcaggtgcgatcatgaaccttccctcatcccttcagacgctaacctccttctacttcttgcctctccaggggcggaaaggtgagttgcagtcgtgagacatggtcctttggcgtaaagtttgccgtgcttgacaggtccgagcgcgtcctcaagtggactcaagagtcggtcgagagggcgttggcagggactcagtcgaagagccaggtagtctctatgaagatgatgggcagtgctatggagaagctatactcttctgaagccatcgctttggggatggaagacttggctgtcggagatgcagaagtcaaggtatgtacaatatggagacttatgtatcatggatggtttgatttacgaaatacaaagatggtgtatgaaaatcctcgacttgtacgagaccacctacgacgcggccctgtaggaaaagctgtagagagtgagtcataacgggatcgacgatcatatagtgaaatcctaggaacaagacgttatctgcaaatctccagcagctcgatatctcgtcatcgcaggtagttgtgggggtacgacttgatcgtgaaaagggagccgggccgactcgaaatgatcctcgacagcgtcaagcttgtcctcgagacgtgtgttggcgaccggatataccaaccggggaaggcatgaagtggagaagtcgttcggtatgaattgttccgacgctgtcagtatgcatttcaaaggtggctggcatgagtatgacatctcactcccgacttcaactcgacataaattgatgaataggttcaacagcaggatttgcctgcatcgatcgatacaacgatagcatcgcgattactcgctgctataacggcacagcgtcacggatcattctgaggaaggcagtgacatacaccagaacaaccggtgagatggctgatcgatcattccgtgtcgacggtcttctgacgcttcgtcggcccttcgtcgtcatcagttctgcccaacgaacagcgaaatcaatgattgaaaaccgaacgcgcgtatcatggcgaggctcctcgagacttacttgtaatgctcatcagttgcaccgttcgataccctgctcgatccaccatggctctgttcgttctgattgttgtcgacttcgagctcatcatcatgcataacactgctaaatcgtcagttcccagtcattctaaggggtcgtcaagacctactcgctcttccttttcataccaccggtttcagcatcgaccttcttctccttcttggaactcttctcggtggccttgatgatcccacctttcttcgtgcccgccccaggagggtcggtgactgaggtcagttgtcagacgttagttatcagaaccatgatcatctccttaccgagtccaggactctactgacagtgcgcggggaccaagcacgtcatcttgatcttgctcgcagctcccatgaaggcgcacatgttcatcatgctcgcatgttcatcgaagctgtctaatctttgagtgtcgagttcgtgtttcaaaccgtcctcttccatactcgcattgacagtagtggtgatgtcggtcttgatgttgtgcttgtttgtcaacttccagcagtggttcttgatggagacttcgaagagagctttgatcgcggattgaggaccaagctgtaactgttcgtcgacctcgctgcatagctggctagcgagcgatttcaaatctttccagctcatattgacgttcgagacttggtgcgagaggtatttctcaactcgacctgatcataagaggtcagcgcgtccgagaagggaggcaacgagcgacataccggcgagacctctgtattgaatgacatcagacaacccctcagatctgcaccattcctggtaagactcgagaacactggtatggagggtcgagggtgcagacggtccagaagcgtcgctggaagagatcgagagggaggccgacattgcggctgagtgcggaagggtgaaggaaacttgagaccgggatcgctccgatgcgggagtattccgtgagcagtgttgatgccaaacactgtattgtgtacgtgactagttacggtgagtttggaggttcagtcgcttgcctggaatggcgacatgttcgtgtcgtcgagatgagtccgagacgatctgatggcggtcgtttcaaggcgagcaagccccgggccacgctaaagttgaccgtggactcgtcgaccaacgaagaccgacaattgcatcaactccagacgcttggtcgggatcaaagcacggggcggacttcgagcttgactgtacatcatgctcgtcatatttctttggtataggtatacatgcggaggttcatacatgatctgttgtcggtgctgccgacgtgacctgtcaatcatacgagccgtgcctgtccggggatatctgcagacgatgacgtcgtgcctgtagttgacacgagctcatcctccgtgttgtcaaggctaccctgcttgttctcgagttcctgcatcttggcttcgttatcgactaattcacgagccttggctgcgatcttgaccgcactctcggtcgtccgcgtctcgtcggccttttccttgcgttgcaatctccgcaagatagtctgcttgtacacgtcactctgcttgtagagatcgagcgctttcggcatcatctttgccaaggcctgcgcgagatacagggatgatgatcagcgaccaagtgtatttcgacgtatttcgaccgcaagagagccagcttacatcctgtcggacttgactggtaggatgtgtctgtagcagcgacagcctgtccgaaaggctcagcggctgtcctcgagataccgagtccgcttctacagcagccatcaggtcccataggtccagtgctgctcgagggtcgtacccagcttccgccatgaactggtcaccggaaaatggttatcagtcgtcgaattcggcgaaagctgagcgcctgccagctttttaactcacattcagcccgaccgcatccgcttccatctccaattttctcgagtacgctcgctcagcgaccacattgttcaaccagttgataaagagtccagccgagtcggtgatgctacggagaaggatggacaggtcagcatacatgcgggtgtgccaagcgaacgaggcctactcacaagggaaatgagatggtcagggcgaatgagactccacgaagcacgtcgaatgccaccgcggcgatattcaggaactgcgtcgatcaacaggatcagcaaggtgtacagtgcatgacagcgggattgatgtcgaggtggccacttacgccgagctgagtccaaggtaatgacccgagcgtggaggagagcagggtttgttagcaacacgacatcatgcaccctgcgaatcgcaggcagactcacattctccaccgcgtgtctctgcgtgacgtgggcgatttcgtgagcgaggacggccgccaagagggtatcatcgtcaaccaagtcgaccagtcctgcgtaaacaaagatgtcctttgaaggcaaggcgaatgcgttgatcttgggctatttcgacgagcaggatggtcagctcgcctgaacgcatgactttggctttccaggacgatacgtcgagactcacgagatccacgacgtacaagctccagtccccgccttcgagcaccttgagcggattggtcgactcgggacggaaaggcatcatcgccgagctagccttggcactaggctcatatcgaggtccagctcgaccacctcctcgttctcgttcggcgatgactttgctcagctccgagacgcggtcacgtgggggccaggaagcgccgtgaatgacggtctggtcttcttcctctagagcgtggatgagtcgggagcagacacgcgagactcgttgtgttcgagggtcatccgaagtgagcaagagagggccgtcgtgtgtcaagacttcgtcgaatctacaaggtacgaacgggaggctgtcagtcggtctaggaatggacaattgcgtgcaaacgagacgtacttcttcatggaccatgccatctcctcgttctcactcatcaagagcagtcgccaacgatctgttctgggggactgatccaggccgagtgcgagcactagacaaaaggcaatgatctacagcaggggaaggccgtgcactccttagcctccacgagccaggccttagcgaagcgaagaaggctgcttacagggatattgaccaggatcatggacgtccgtcgatacttttgccatagcctaaagttcagaagtgtcatgtaccggtcagctttggtctgccatcgacacagggaagggcgagcgggaacttgcctccatctccagatgaacggtaacgtgatcaacgacaccctcgtcacgttcaacagagctcctttgagagcaggtaaagcgaagaagaagacgtcctggcttttaggagacgagtgaaacgagcgggactggcaaatgactacggattgcctgttggagagtcgggtcggggcgtggatgggagcctgtacgtcattccggttcagattcgaaaggtcgttgaacctcgagcctagtcgtgaccggcataacgggacaaaagctcgatgttgagaacctagtctctgcaggctattccggaggatcattctactagcttgcttgccatgattcagcttgagcggatgggcagagtgatggacgaatctacgagtaaagtggaagcttgttcaactggtcgaacctcgctcgactgaagggatccggttaacggaagtaaatttcggaatcaaaagctcgaaccaagatgtaactctacccggcgtggagggtcgagaaatatacctattacatttgatcaatagccaaccagctataaatccagctcacagaggtggaacactctaccactcgtcagccaagttctgatcgtcagatccccccggatgttgagagaaaatcagaaagtgatgacgagtccgtcgtaggaagctctgacaagtcgatgcttactctggggatgtcatacggaccatcgagaaggagaggaagtcaagatggactctagttgcttctaacagctttgtacgccgtagcagtcggtaactgtttccgcactcctcagacacaagtaaatcaacgcgaaacagaaccacgagcaaagaaacggatgatgaggccgatcctagatttcccgaaagacctgtagggcaggtgcttccatggaattatttagctattatcgggtagcagcaggtagaagagatacgaaaagatgtcgtgattgctatgttgtcatcatcctagtgtatcttcggactcgagcgtgccaagatcgatgcgtgagccagaaggtgttgatttcgccatcacaggtagtgctgaggatgttctcactcgaggaatgagagctctgaagaccttactttgattcagcagtcgtaacatcccgagaaggtaataggaacattattattgccaccaggccgattatcatgacaagcgcgtcctcaacacccacgacgcgctgcagggatcgattttgtggggtttgttttggtttgatgggaccgagatgaaacgcgcagctgtgctgcgaaagggaggtcctttcgctctcccccgtcttgtcgggattggtcgtcgaaaaactcaccgatgttcaaggtttcgacacagcctcaatgattcgtcgatcggcgcatggcgagagaggaccatcccgggtcggctggatctcatacgtttcaactccccgttgccattgcttttcgcgtggagcgtgagattttgatgagatccaccttgatcaattccatcaacacgctgcatccacttgttgattgattgatccatccccccccggatcctaatcatctctacccccctcgttgagaattttaaaggatagctcgggtcatcgatctcaccaagtcatatgtgctacaaaagttcagggtcttcacacatcccccctcgatgatagcctaaaaccgcttcccagagcatgagattgccaatcggtctcttctctaggtagtcacggttgttgaccctccaagatgtcgcccatcactgagcctgtgcgggatcgacccgtaactcgatcgactgccacgccgtaggtctttctcagccgagactagaatactcctcgactaaacctccaaactcttcagcacacgcacaacgatacgctcagccgaggctaccccgcaaaggtcgctccgatcaagaattcagttcgcccaggagccggtagccacctcaccaaccccgactcgatcgctgcgatccgactgcaccttcagtcctcgttcccaaatcgtgcatatcgaccttcatgtcaacccgttaacgcctcgcaacagtgggtctcgttgcagaccaccacctcgacaactacgtcgtacgcgatcccggaccacatcgcagacgctgtccgttacaactcctgatcgcacatactcgtgtagccgaccaatctaccacgattctttgtctcgactcgtcacaccgtctcgcttatcaccggatgtcaaattcgttcccctgttcactgcgtctccacaagattctaccgggtgcaatatcaagctccaggaacccacctgcagatcttatcagatcgaccaccatcagtaccccgacccttgtatcatcggggagacgaccatctggtctggctctttccccatcagagtcgattccgattacccacgagccgtcacccctcaggatatcctgcgctataccggcctctctgaatctcccctcttttaccaagcatacgagccgatgcccattacccctcgctccgaccggatagaggcgactcgtagtcccaataacacctctacctcgaactcgtacacgacttcagacccatacacgggtacctttagcgacactaccagtcccaccgaactcgcctctccgatcgagatcgaccccgagctggaggtatacttttccttttccccgctcgtcaaggagtcctttggctcgacacccgtcagcgcctatttccaagctgcaagggaatccgaaactcgggaattgggtctcgacgattctaggttggaggatttcgaggagggttaccgggtggcgagtccgctcgataggatagaggcggactttgatacaaggatggaggatgtttggagcgagacggattctccccaagcacatgtaagacaaggaacgacagaggatacagtgccgatggagtcacggatgacggacccgacatctagcgggtcgatctcggtagctcaaattatgaagtctccggaaacgcaacaagtcccgctcgagcagtccgtcatcattggactggtcgactatccatctccaactccgtcgcccatgtttgtcgacatacggacggattccctcgttgaggaagaactcagatccatatcgccagatcggcacgaagtcatcgtccaacccggatcctctctgatcggcatgcagacgcctttcccagctgaagcgtctgaactcgtcgataagcacgaggagaacggaatcaatccggcagtatcagctggtacgctacgtgatcaggactcgaaggtaaaggacagggagatactcgcgacatccgctaatccaaaaagagctgtgaccgagaacgtcgaacctaccgagagtcacccgggtgacacgccgaacgtgaccgactcgatcccagggcctttccagctcagcttgagtaccgaaatcgtcgacaggacacatgatatgagccctcccgaaaccacgcagtcccacgcgatgacgagcgacgaggagcttcaagctatgctgctcaaaatcccggacaaacgatacccttcacgtcgagggccccgcgcgacctcttccgcgccccccgtcgatcgtaaaccaggcgcatccttttgcagcgattcgactgataggagcattgccgtcgaggtccctcggcctctagcagctgcaaagcgtaaacccaaacccaaacccaaacctctccagctcaaagggcgatcgcaaagctcgctgaacgtgactccggtgggaacgtcaaatccggacgtcgttgctatcgtcaggatcgaaaaggagcaaggtcaacaggatgtcagcgacgccgaatccgaactgacaccgttaccggaagaagagttgagctgattatggggcggcgaaggggaaaaagaggggaaggggggcagggacagaacttacgctcgaaagcgattcaatcagttgtatgcaataacagaacgtgtcgaaacccagagcgcatcgggaacagcccttgtcatttcatcagctaagaatatgccaatactatattacagtcgtattatgaaatacaagaggtatcgttacacaagggaacatgcttcgtcatagatgcgagaaacaagagacaagagacatacatacaccagacacgaagcaaggggatggatcgggttccatagcgctgggatagaaccttttcattgtgtgagttttcaaacgtttccgagagcgtcgttttggacaagctacatcgtgatgggcgctccgagccggatcatcgggccttccagccgtttagtcgctttgccttcggccgaggtggaggtgcccagccggaatccgagttgcgataaacagtctgtcaggtcacgtttcgttatgggttttgcaaggactgcgctaaatagcgacccggtgccggctgggtcggccgtgttctgggccgttacggctgcaagctgcttgtgctcataggacgtcgcggcgataactaccgttgggttcagatcgtcaatgtcatccggttcagtcgatttcacctgtcatcaatcgcaactcactcggtgtatcaaagttgggattcgatgtcgatcggatcatccttgccacttcttcaccggtcacgttcggcatgacgagatccgtgatgatgatatcgaaacctggaagagacagacgtgagcagggccgagctgaagagctgtctctctgaatggcactcacgaattgtccccatggaagccgccagagcttccgcaccatcgttgacacagacacaacgacaacccatcctagtgagtagcgtttcgaggatcttctggctgattgggttgtcctcggcgatcaacacgtcgacggctcgggtagctaccagactagtagcctcggatgatcgcctctgggccacggtcgattctccgctctgtgcagacatcgatcgagctttgtcgataagccccggcgaggcgtacgaaaagctcgctccactgtccgtgctcgagcccttctcgtcgagatcaagtccggatgcgatctggaccctgttcaagggatgctgatcggatacccgacgagcctgagtcgtttggccggacgacgacggtgtctgtggaagagcgctcgcacgggagagtgacgagctagtcgatgcagtcggagacgggggaagacagtgctgagaaagaagggccgagcgaacacatgtcaatcattgcctaccatcatcctggaagctgatgcgactcacttctgcgaccgacgcagccctgttttttgtctttttgcggtcgagcgctacgctcaatcgacgatcccgggggcccgcttgctcgctagctaggatggattctcgccgcaacttcttgatcacatcgtcattggcctgtttcagcacaggcagattcttgaacgtaaaggtaccgaaatcatcgccggtcgacgctgaaccgtccagttcgatcggttgttcaaggccgccagtcgctttcccatccgactccgaggcctctttcggaacgacattgtcaccggatggggcgtcgtcttcgaaaaagacctcggagacggcacctcgcgcatcgaagtagtctgtcgactcgggatcggtgacattcgggacaaagttggcctcgaccgtagcgatggtattccaatcgagtccggcgaagaaggggtgagtcttgatttcacaggcaccatgagcgcctagtcgtcgccccggatccgtgcacatcagccgttccatcagatctctcgcttcaggagacagctccatttggtcctcgaaccaattgatgcgtctagaaacgatattgtcaaagaccttttccggagtctcgtcgtggaaaggcgggaaaccgtagatgaattcgtagagcacgacacccacagcccactatggacagaatccgttagcctggaggtagcgctgatgaagattgagtacaaggccttacccaatcgacggtcggagcgtctgagcccatccctaagactgtgtatagcataatgcgtaaagtcagcaaggttgcgaccaagaggcaaagaagagccacctcgacttactgctctcggggcacaagtaatcaggggtaccgacgaattttggcacatcactggccttgtgtgttccgctattccgggtcgacggcgctcgcccttgatcacgactgcgagaataggcgcctgagaaactttccgaaccactcgattcgtctgctgatccgacatccgtgagatgactggaaaagtaggactgagagagactcgacgtggtgggaggcagaaggaaatccggcgtggtcaacgggatctcgctcaagagggcggcagctcgaggtgagccagttcgtatcaagcctcgcatctttttcaagctggtccctctcagtactgcaggtcgcggtcctcctacttgacgattcagcagaccaatacgggagagtccaaagtcggtaagcttgagatgccctttggaatcgatgagtaggttgtcaggtttgagatccctgccgttaaacaagctcaagtcaatcacctgaatcctctgcgtggccgactcgacgatcacttaccgatgcacgataccgcgatcatgtagatactcgagtccgagtacaacctcggcgatatagttgcgtgcccactcttccggcaagccgcccaatgtcttgatgagagcagcacagtctccaccgttcaaatactccatcaccaagtagagatagtccttgttttggaaggaaaagtacagcttggccacgtagggtgagctggcctgattcatgaggatcgtcctctctgccttgacattggtgatctggttcttggcgatcatgtctgattttttcagagccttgatagcaaagtagtccccggtcgttcgcttcttggcgagatacaccgaaccgaatgccccccgactgatgggtttgatgatatcaaagtccttgatagaagtcggtgccgtcctcgccatcgaggcgacagagggaagacgaggggacatcggtggatccatcgatgccttgttggcagacgtacgacggctcgccgaaatccgcttgggaggctttatgatgggcgggctcggtataggcaagtgctcggcggatgcagccggaggattgatgctgtccacggtaaatgtgctttgttgacgctgcatcgttgtggtcgtcggcggcagccgagctttagggtcgatgacgcgtcgcttggcggccgatggcgatatgctaagcgcattgtctggcggttgatcctgcgcacctgcggcctcttgactatccgcgttggaactccgatcgctagtactaccctcctcctctgctatcgagagcatacgatccatcttgtcttcccattctctgcgaacacgttcggcatacatgatggtatttcgcattcgattcacggtcatctgtttctgccggatgagctcgtcgacgtggaggaacaacagctggagtgcaggatcatcagtctctggcttgacccatcttccgataaaagtcagccgatcttcagacgccggggacaagagttgctggtagctgatcgaattggacgaatcctcgtccttgacgctaggagtcgaaatggcattggccagtccgagcgcggtctgcgcgttctccagctggctctgttgaattcgtctcacagccagcatgaccggccccattgcatgatgtggtgtcgatttggcccgggtggagatcgtcatgccctgatattgtgcgggttgatcgacgacaccattctcgagagatttcagaatcttgttgacgactgcaatcatatcgacgactttttcgttgacagacgaaatgtcagcctcgagtcgatgtacctcgttgcaagtctcgttgtgtttttcgaaaaaccaggtagggacctgcctctcgcaaatacggcacaagatgtttggagccgacatggaagagatggtcgggaaaagcaagttttcacccgagtccaaggcgggcgtcggagctcctacgtcgcttggcgtgtccatggtttggctgatgatgacgggtttgatgacccacatcgtgtgggaagcctcccccgtgtcacggtctctcatgagcatgccgataccttcgcattcgatgtaggtcggtccgggcagccgggagatatcttcgtcatcagtctgcatcaggcgcaacaaccggaacctcgcctgtgctgtgtggctgtcgtcggcctcgagctgccgtcctgcattggccagaacatcgacatcagcgggggccagccaggctgtaatcggtgtgttttccgcgtcggccggatcggacctattgtgcaaaatgtgtcgagtggatcaggattcggtactggggggcttaaggcgttcatgccagatgacttacccggtaatctcgtgccaagccggattgacccactcgatcaactccccaccgaggctgagttcgagcacaatgttgatgctcttgttgtgttccgcctgcaactgcaagtcctgtgcggcttgcagcaggacgggcacggaagctgcaacctcgcttggccgagctgtagcttgagaatcctgtgggatcagatcgaggttcagttctggagccatttccagctgatccgacatcgaagagacggtgcctggtgtgcctcgcccggacccagcttcactagtcagtctggcaaagacgggcggtgtaccggtcggttctccttcgcgaacaggcttgagcacgaacgtgagcggctcattatcctcgtcgccgtcgaaattccagaatcccttttctgcttcccaccattcgacgacccgcgtcaagcctgctaccgccaacaagagacggatgtaccaagaccttccttctgcttcgggatccttgtcccagatttgacccacgtcccagactcgtttgataaagtccctacatgcagcaggtttggcgatcaagacatcgacgtctgtttcagtgacatcggtcgctatgccgatgatcttttgcaaggcgtcgacgagcttggtattggtgccctcgtctgccggattgatgaagggtccagataggaatccgggttgcggcatcggtgatctggacctagagtttgaccgtgagctggcgttggagcgatctgccgtcgaggccagtaccctgcccagcctctgtccgagttccacacaacgtgcgttcttggcagacaaagctgatgatcggcgtcggcgtccaggacttgccgggtcgtctcgtgcagcaagcaggttggctatttctcgacgcttgatgggactcgtggcggctgacaagctgaccgagctgcgtcttgcgtgcgcagactgtggaatcatcatggccgcgactgtttaggggtgatgtgcacgacatgtcagcttgcgcgccgttagaaaggagcagccgtggagggagacggaatgtaccttgagagtgcatacctatctctcgatccatgagatcggcatcgtcttctaggtctgaatacgcggtacgtggagataggccgtacgaggttctcacatcctgtaatatttcttccggatcgacgtcagattcggcgatcgcagggggcaggtgcaagtgttcctccacaaaggccgtaatgtcggaaacgataaagcgcaactctcgatcgcacccttctttggcgaccgtgagtcgatgccggacgtgctttctgacggatgcgagagtaaactcggtattactcggccccgtcatgctcgaaccaagctcctgctcggcatagcttccctctgggcgagtcgcatttaaagccatgagcggtgacggtgtctggtcccagtgatggaatccaggcgtgtggttgcccgtgctcaacacaccagaagaggcatgcgagtcttgcctactatgtgaagcaaacggtgcgcggttggacgaattggacgtggacgctccgctcgagaggttgctgttttgccgaccgtgcaggcggggaggtatcaagacgttgttttccagcttgagagatagcggtggctgcctgcggcgtgcctctagactgctcgaggaaggggctctaaaggttgacatgtgatccgagctgagtcgggatacagggaggggtttggcgatgagcccaggtatcgcgctcgatggcggtgcggagggtgcactggacaagctttcgacctgttcgatgttggtcccaacgggtaccgccgtcgccgccaccatcgaatcttgttccaattgctgcaagctggtgtgcgacatggctgtacgcaacaggtgatgactcgacaactcgtctgctttgaccgcctctcgcttcgtggggagcgatggcgaatctaccggagccgtacttccccttcgagatgacggcgccgagggcaacttgcggggcgtcggcgctcgtcgacgaggactctccgacccatatcgatcactattattgtaatttgaaccttctggttgattaccaaagttgctcttgacggcgctccaccagccctccatcttggcggcaatattcttcttcttcttgcctggaaacgcgatcgacctggccgaatgcatcgacgggtgcctcgagatgatgccgaaatcccccctgtgcgagctggccttggtatcgagagctgacgatgtggaggacttggcgccatagctcaagctgagcgtacgcgatagagcgagtcgactggggacgctgtttcgaccttcttcgctcttgcggggcgaatagggcggacgttctggttccggttcgacgatcgaactgctgggcggcggtacgctttcgtgactggtcgtgaccggatcgcttgccggttgcaaatcctcaaagtctcggatcggcggcgattcttggatgctcgatgggcttgccgtcttgacgtcctgtggttcgccacctatagctcgtgcgacttccgcttccgactgttctgcttgttccgcgcgaatcttggcctctttgtaccgtttgtattcgtccatccaatcgacccattcaatctcgttgattgcgtcgccggcgatcccttcgtctcccatactgtcttgacgcgagacgatcatgggtcgctgactctgcacgtgggacgcctcgggtctgtgcgataaccctgtagctgccgcatcgtcttcgagagggaatacggtaggctcgtcgtgatcttgacccgagacgaccctcctgaatggcctggcttgatctcgattccccatgctgaccccggtcgaggtgattcctcgtccgaaagcaggtttcggaggtgccgtctcgcctggggtcccgccatcagtccctgaactgctcggtcgccaacgctgaatcttggctcgccgactctgcatgatcacgttggcgtgccttgaagcgtcgccctcggcgtcctggcccgaccccgacatgctgcttcccaagatgctaccgtgccgatcgctcgaagtgctcgtggccatcgagctggcgtcctgtgccatcgcctcgacgggcatgcctcccatgctcatcatcctaggtttcatggcgggcttgctgatggtctcgttcgaggtcgatcggttacgagcgtgatgtcccgtgcggatcggtggagagaggaacgtcatgctggtactcgatccgaggggttctcgaaaggggaatcccgagacggactgggtgggcgtgggacgatgctctggcaagcgaaccgtgttttgggggacgctaggtacgttcgtgggcatgacaaaggcgctcggagggggcaacgatggtcgttggcggggtgcgtttcgtttcaaccgggtgggactcggtggaagggaatcatcaccggccgacgtctttcgggtgggtgacatggtcgcgttgagatctggtctggaagcgacctctggctcgggttcctcttggatggtcgaggaaggtggttcttcaggggtcacgttccgcgtggccgaaggtgtcgcggggatcttggtacccgacgcttcgacggccaaatcctgcaattcgccgagatcgatcgacggcgtgttgaatcctgtcatggcctctggggatgaagtcgatggggccgtcttgagcaggtcttgcgccagcctgaccgaagtgggcacccgggtcaacctgatcgatcccgatgccgaggacgttgtcgaatcgatcgaggcgtttgtcctcggactgacgctgagttcgggtcccggtgagctggcccatggtgaagggagagggttcaggggagagatcgttgagacggcatccgagaccctggtaggcatcgccaagggcgacgagagacctgtgcgtgacaccgacatccggcggtcggatggcaattccgaacgacgtctcagccttggggaactgtcgtgggagaggaaacaaagacaataggtccaaaaggtcgacaagacgtcagcgtaatgaatgcatcctctcgagaagccgaccacgcgctcacgtcgtcttgacgccaggacctagcccggagcccggcatcgtctccccccgttccctcacagaaccagcgtcgtcccctgccctcctcctattctcgagcatcaaattacctcttgccaacaagctcgaggacatgccttccctgcccacggatcctccactatcgctcctccctcgtcctccttgttcgtattgggacgagatcgagttcatactatcgctcctcgccctcgcgtgggtcgtcagcagcgtctccctcgccacggcgtcgagctggacgggcgagcgtttaggtgaagacctaggcgattgcctcggcgaggacccgctgctcgtccctgacgactctagcgtgtgattcttgctccctccgcctcctccaccaccaccaccacctgcactggactgacttgtcgaccgtgtcttgcgttgttgttgcagcaagaggtgattccccggggtcattgccaacactggggacattccgttgacgttcaacacgttccccccgatgccggctccgaagcctagaccgttcccttccccgagtgtcgaagtggacgagctcctctccctcccgctctccatcccgctcatctgttccggactccccggctgagaacctcccgtcgagctcttgtccgaatcgtccgagtggggttggacttgccatttcgcgagaggagaggaagcgtttggctggttgatctttctgatccccgtgaacgtcggtgggaggccggttatcccgagcgtcgatgtcggggtcggcgtcgaggtcgaggtcaaggtcacacccgggttggcgatcgataccccacctttcatggaccctgggttgaagatgggtcccgtcgagctcaatatatcccctgccgccgaattgggtaacccggctggtagtaccgccggcggggaagatactggagaactcgacgacgtcgtcctcgcccctgatccggccacaatgggggcttccttgtcatctccatgggtactgctgctagtactatcggcgagactcgtccctgtacgtccttgggtgatgggcgagagcgtccggtgaggcggggaagggggtgaattgacgtcttccaggtaaaagatgccttccgggtgggatgccatgatcgtcggagatccaacactactgtcgccgccgagcgagccggagaacggtatcagctcgattgccctgatgtcgtccgtgggtcgctgatgataggcgtaagactgacctggattagagatggatgatctctgtgtgtattttcaagcacccatcaccgctagacctgtcgtatcgagagttcctttctacggatcactccgagtcgagccccgggttgggttggtaactaacgtctgccgcagggcgtatttttgagtatacccaagctatggtgaacgtcctcgtcgcagaagtcgaagacgacgttgaagtggggagagagggagcgaccacgagtgttgagctttgttctcactcgtctgacctgctactcgtctaccctttgacgacgagtcgccgccaaagaggtggatcgagtgacgaccctaggaccaaaggcggggccggacggtgtacggcgggttggcctctttaagcttccaaaaggtgagataggagaggaggtatctgagagccagccgagagctgcttgatcggccccggtgggaatatatcgaccgtctatcctcttgctctctacctctgtgataagtgagtgtgcgtcctgtcctgtctgatcgtagggtgtgttgtcgcaaggtcgtcgactgctgactgtgtgagtgctggatgatatggtgatcggatgatgtgcaccgcgtgaaagagagatctcggtttctgttgaggtgagagatggcaaaagcctagctaggtacgacccgtgacaaacccagccacgcttcgcagtagagtaacaagctacgacgtcagtatcgtacagcagtacagcatggggtcaaacgatgagcacgagcaagtacatcttcggggttagaaagccatgtagctagctagtcgagtgggatgcggggttcttttgggggggtttgagcgaggcgttcacaccggaagataatgacgaacgagaaagaaataagagcaagagtacaagagtaggccgagtaggtgtgtgtgcaaaggacagacaagatggtcccgaactgattagcacaaacgtctctgccattatctgcccaaggcagcaagtataatggtatgattatgatggggtatatggcaccctcccatccgatgtcaagcaacaacgacaagaaccagaataaatatgacgcagatctcgcgttggttgcgcgttgctgccagggtagtgaccgcagagtgttttattttctgaacacacctcgtttggtcctctactttaccctcggctggcatataccatatcgcgtcatccagtcgaaccagggatgatcggatcatgactgcattccacaactctcctcggcaacctaccatcatccaccggtgagtgacaagtgaataccaccgaccccccaacctcatacctcatcgacggtcctcgacgtccgtccgtccgtccgttcgatccccccccggccgggtaacaaaccaacgaacccgccgccgccgcgtcctcgggatcaattcgatcgctaaacacctacaacacgcacgactactactaagctactactctaattcattcctctacgagttgcgactaactagcgagtaagtgtagtctagctagtctagggagtagtgtgttgacattatgggcgcggtcatagagggcgattaacaaggctagccgactagtcgaactagctatcgagctagtagtcccctgagctaacaaagtaaagataccgtaggcttgatcgtattccgggaaatccacaggaaaggtaggtctcttctcgcaagtgtcgggcggaaagttgtacggcgtgtcttggtgaaacccttgtctcggtaacctaagtctgctctccgtatccgactctacaacggggcacgtacaatctgattgccctcgatcgctcaagacctgcagccccggtataaacatgcggccagaagcgaacgaactgcacacttctgcgcaagtgagattcgtgtgagacgatagtgtcaatcgagtgtcgaaatccattatatctcgcgagactttcaatctcgtctgtagcactgctattttcgtatacaaccacgtctgtcgttattttctaaaccctaagaatcgatcgagaagattatatcatacacccgtcgtaacacctttttcctgcgcttctagacggcgagccagacctttccctcctggatcacgctgctaaacctcctcccctgacccgtccgttcgagctggaacgccctgaaggtggacctgccccgaggtcggtcctcccgctcatcatcgtcgtcctcgtcctcctcgtcggcttccccgagtacgagcgtggagaggtccgggacgtagtgcttcgtcgatcgaaagtctggcgaggagggtaaatggctggccggttcggtagccgggtgaggggtgagtttgcgttccaatttgggtcgcgagaccggcgtcgtcatcgagctcgacgtgggtagagtcgtagtagtagcagcgatgttggcgtcgttgctgatagcgggcgcggggccgaacaaccccgtcgaccccaaggtgaagggaaccaagggggtctgtttcctctgcaacctcggtaccgagctatcgggttctgcgagtttaacaaacaacctcggtcgagcgatccctcctcgtttcatcgccgagacgggtgcgacagggtgaacctcggcttcgtgcgcgtagtcatcgacgttggcgtcggtgtggtggtaagcgctcatcgatgaggacttgggatggttctcctcttcaaagtcgggaaagacgatggtctcgggcgtttggaggtcgatcgcgccgttcctgctcgaagtggacccgctcctcgagagcgcgggtggggaatcggctgaccagttgccccagctcgacgtggacgaggacgacgatgaagctatgctgtggacggtcgagcaggacgatcgacgtcgttcgaggagcgacggtgggatcgggctgtggatggtcgataggcgcagggggaacgaggccgatgggtgggatgcggcatgcggtcgagggtacctgaacgcggcgtacgacgacgacgaggacgacgacgaggacgacggggtaggttgtttggcgggtacggtagggaaagggaatgccgatccttctaccgagtgtgggtaaggagtcaaggtgtgcacgtgttggcgaggcatggtcgaggtcatgtgatcgatgggtgtgtgggcgtttcaagtatgatgatcgtttgataaagtctcgaggtgaaagtgcgtgattgattttgtggtacaagagattgaaatgggtacctacatcgacctggggtacgatcacctggttcgcctgtatatatgctcccaccgacacgaccgacgacctagtcatagctgggcatcgatgtcacaaacgtccttctctctctgccaatttcttggctccgtgcccggtcccggcgcaggccgtagccagcaggcaggccttggccgagaggatgatcaagaaacgcaatcgaacgctgatacatccgtccggcggcgtacaaaggatttttattatcgagcgacggcctcggccttggaaatccaacgatccacccctcgctcctcctcttcgcccgtgcccaccactcactcaacatggccgcgcggcgggcgaagcatcttccggcggaataaccgtggagaaccaagctgcagagatcagatcagatcccgcgcgctcagtcagattcgacgggatcattttcactgcctctcagcctcccccccccttgccgtggatgccgcgttctccgcgctagatctcactcggcgccgagaggattatccattccaagacgaacggccgtcgtggtaagcgggttgatcaccggcagctcgtctcggctgatcaaacaccaactgaacccccactccccccgcgtccctcttaccaatcgctcgtctaataagtaaaggaaatctttaccagctgcagcagctgattcccgaacgacctgcgaactgatcatcaggatatgacgacatttggctacacgatcgcatcatccatctcgatatcagtagatcagtaggccgatagtctagctgctagctgtgaggatatgacggccgaatatcgtgacgagacgcgcgagacgggaatccggttgttctaaaaacgaaacacttcgcaccgcctccacgtaagcgtgacagagtcaatcgtcgctgccggatccgaaaaaaaagaggttgcatcaccccggccatcatctcgcccaatgccgattgcccgcaaacccgctcgctcacttactcggtcggtcggccggctggccgagatatcgtcggcggcaaccgatacgacgtacgacgtacggcgattctggtgtatgctgtgctgtgtttcaaggaggacgacctgatggactgcggccggggaagggtatgtaacttctgacgcacggccgatctggttggtacgatccgatccgtccgggctctcgtctcggatcgggtcaggtcgggtcgggtcgagtcatgttcagaagagcatcgcccatcggtctgatccgttcaagatccagaacaccatccgtctcccgctactcgagtcccgacggcctagagactggctttaaacgcctctttggctggccttttgacctgcagtctgacatcaaattcgtggccgacacgtatttccctctcgatcgatgacaatttatcgctctgttacactcgtaacatgaatatgatccccgaaccgttcgagatgatcagacaatcaaacaatcagcaatcagacgatcaaatgatcaaccgtcaaccttctcctactacccgggtgatacctcccggtgacatattcattacaagctgatggctggtggctatgggcttgaggctggatgagagtcagattcgacgacgccaggacgagcttgttcagtcatggggttagtatacacctagttagtagtacagtagtagaagccgactgctgacgaggatcatcattcattattcgctgatccgctgatgcgcgggatctggcgagtgtgcatatgagcatttgagcatgcgtgtgagatgtgtgcgaacagggtacagggtatgagtcccccccactctctctccggtgtgtttcgtgtgatgtgtgtgtgcaagccccgacctcgactcgactgtgggcttcccccggatgcagagttcagagtacagagttgggtccggggtccggggtgaggttccgggttggtcagcgagatccagcctggaccttgtcccctcgagcgatgtcgagcccggtttcgcccggtttacagtagcgggctcaggcgatgcgaacaccccacgcctggagagagtataggtgttagtccgagagacgaatgtccgagcatgatagagggtaaaaagtgatgcgctcgatggggatgaaacgggtcgatcgtttgacacgggtcgtcgtcgtaggcctgccaggagagatgggtcgaggccccgcacagagatcgttgatggttcgaccgagactacattactcgtcgcacatggtttgatcttgttgtccacgtttgtctgcctgctatctgtgatacaaggttgaccgtgttctggccgttgtgttacgtcttcctctcggccacgacgacgcacgtcgcacgttgtcgatggccgtgaccgtggccgttggccgaggtagagacgtcagcgcgatccggccaagccccgagccgtagactagtcgttgaccattaaatctcgcgtttttgcttacgtaatattaccaattatcattccaatctcactagaaagcacggcgacctacccatccatccatcaaagggggccaaaagggaaggaagggtaaaggatcgatatgaccatcgtatcaacaaccacatcacccattgacaacaacaacctacctacctacctcgacccttgtcaaccagccactggacgatcactcaagctcgttctcattcctatacacacaccaggtcagaagttcctggccaccgaccacttcgagcgacatcgatcggacaatccacatcggcattccgatcgtcgcccccccggtgagcgagtcatcaacatcaacaggtcatcaaattcactcgaaattcacgtcgacatcaatcatgtcacaagaggccaacatgaacatgtctgattatcttgatttcaattttggcgacgtcctccaggtaagtcttccgcggggggcatgatcgcgattcccgccgcccgagtgatgttgataaaggaccgtccaaccgatcgatctgccctttcctgacccacgcaggctccatcatcaccattcaacccgttcaacgagtacgatttcccttctccctctcaaccccactctcaccccgtccctggaccatccaacgccaatcccgacctcaacgccaccgcctcgacctcgacctcgtcgcatcacgcctctccctggtccccacccggtctcacctactcgctcacttcccccgaagaaactaccagtaacgtctcccctacaatgggtgccgatttcggcgctttcagtcccgtgctcgtcaacgactatttgaccgatcccgagggcacctttgggatcaacgagtttgattatcctaatcgggcgtacgatgggaagcggggacaggcgcagcaggaccaggacgtcttgatgaaaggtatggggtcgtttggcaacaacaacaaccctataaacaacaacaataacaacaacaacgggaccagcgacatgagtaacatgagcaacaaccacaatgttaccggggctgtggggaccacgttcgaccttcagctgccctccagctcgacctcccgggatccgagcccgttcagcgagtaccgggtcaagcaggaacccatgacggatcctctccaattcttaccctttgatgcgagcgggatgggcgggacggtcaacacggccgacttgttcggttcgatccccatggctggcgcagggatgggcatgaacgtcggctcaaagtcgaacccgaactcgaccgagggcaaggtggacgcgggattcaacgggtccatcgtctttggtaacgaggacgtcgggatgctgggtgattacctcgtacctttgcaacaattgcagcagcagcttcagcagcaaggcgtcatgcctatggctccgacccaacagtccgaggatgaaggggactcggtcaatgccgcctctcccgcggctcattcggtagcctcgacctcgtccaggaaaccttcgacggggacgaccgctcccaccgtcaaaccccccgtccaggccggttcgaaacctgcggctaaacgttccgttgcgaaaaagacggccatggcgaaacaatcgagatcggtctcggtctctcaggaccgggaacccgagtaccggggtgacaagcaggacgacgaggacgaggacgatgatgaggattcgcacagcaggcgaggatcagaggatatggagactctgcccttacccgccatgttcgggggtgtcaagggcaagggagggaaaaagggaggtgggatgagcagcgtcgtgctcgaagatggggaagaggcaggcgaagaggacgactggagacctagcgtgagttgtgatcgtggatgcccccggtcctgatcgacgtggactgacctggacccacacatgacctaaggccgaggaatataaaaagatgtcgagcaaggagaaacgacagctccgtaacaagctttcggcgcgcgcctttaggaatcgacgcaagacgtacatcaacgagctcgaggatcacatcaaggacagggacaggttgatcgatgcgatcaggaacgaattgaagaatttccggagcgagaacgacgagctcaggtgggttcatcgctcagccggcgaaatgatgaaacgcgcaccagtccggatgtactgacgatgtttggaatctccatcgacgacattgcagacgcgagattgggatgatgaaaaaggccgcgctggaaccaaacgaggagatgacgcccgtcaagacccccggtcgatcggccaccgcatcgtcctcgtccacgaccaagtcgagctcttcctcgtcgtcatcccccatcagcacgttcaacccgaggaaagacctccccgcatcaacctcggcattgttgaaccaaatgtcgccccgttcaatgtggggtgaaggagccggagggtacaccagcgtccacacgacgttcatgcccgacctggcactcccttcgacgctccagctcaacatcccgcgacaaaacttgaaccctcacctgaacattcctgccgagcccgtgaccaaggcgccacaccctttcaagtcggatgggaacaacctcggagattccttcgacgcctggtcttccgagaccccgttcagctatcgctcattggaggcttaccgcatgcagctatggtcgaggatggccagggacgcctcgttggccaaacaaggtgtgccgctcgatatgcgacccaaattcctcaaggaacccaccgaacacaaggccgccgtcgtcgacgctgctgttgtcgcgcaagccagctcgcccgatcagatcgccgccgccccagtgctctccaacgtcatttcgagcgccatctcaaccagattgttctctgcattcttgtcagccttccagtctcctaccggacgtggcctcgatggggacagggtcgccgccgtattcacgggcaaagccggtctcaaggtcgtcaacaacggtcctacatcgcccccattgcctgcggcgggaacaaccccggcctcgtctcgatccgacatcgacgccgacgccgcgctcgccgcgagctttgctcatctcaaggttgctaccgagagtctggggatcaagtctcccgactcgtcgtcgacctcgtcgaaatcgctccctacgtccgacgaagactcgcgaggctggggattcctcagtcgatcggtcgtcaggggatgagttgaaaggcgaaatgtttcttgttttgttcgtttgaaaacttccgggcgcccttggatctcgtcgctatggatagatcgtcatgttgtttttcttaagagtccgtgttactgtttgattaatacccagaatactttttccgcttactaaattatgtatcgtagttatatcgaaaactcctcctactgtcatgacagatcgtgaatgtaattgaaattgaaagacctgatgaatccgattcggctggagctctggaagttcaagggtccgtgtcctttataggagggcgctcagtggagcgaccgagagtttgcttcctactagtaatcgccctcgacaattgttgtgcttcgcttcgccgataagagtgcttcgtcgtccgatcgtgcgacgacgtgacagcaacaaacgcaagctctcatcgcgggagccaacccattttttgatcaccaagaagccgtcaaggtggaaccgcgcgtccttgggccccatacgcagggggagaggacaattcagtagaggccctacaatcgttggcccaaatgatgtcctagagccggtctcggcacttttccatagaagactcttttgatggatgatgttgatggtttctgacgatggctcctccccgtagcgcatcagcgatgggttggacgacggacctgaaatcgccgaaagtatacgtatccagcttgcgaccgctttttttcttcttgggaggtaaaggcagggtgatcgcaaaagccttgaagtcgtcttctttgaagtttctggctcactaaaagctcaccgatttgattatggtcggcccgggacttcgaacaatcggtcagacggatacgcggctccccgaaacacaggattcggggttagtctggcgacagactgtagcagcatatacccgcgcagtttcagccgcgagtagtatctacccaaaacagcataactagcataaccaaacctgtccctttccaatcccgggcgactagcggttgaatccgtatcgacgaccgaaagctgtatcgcttcgaacgtaaatcttttattcagacatgctctagtgacgtaaataacatgcgtttcgagtcccgatgacgagcggctttgccggatattcattcgacctggggaaacctaggccacctggcctccaaacccaacccgaccctgcggctcatctatacgtctcgacccgaacgccctttcttgaccgctggagaaaacaacttcgatccttctcgacccgtgctcgtcctggacctcgatcatgtatttgattcttctcccatagacggacctgtcctgagggtccgtgtgaatgtccatgaaaggcttggctggggacgacgcgtctgcccgcgtgatgaatggcccggcgaggatgggagggggtgtatgtcgttcggcctgaataaggtcggacaggaatcgctttatctcgctcgatttgaggtcctctggcgagtaagaggttggaaacgatgtccgtacagggcgccacccagagtcaatattagcgcttcgtgtttggtatggggctgaaatgggacttgcgtagcaggcgccgtttgcgagaacgcatcttccctcgcatactttggcgtctctggctcgatccatgtcttccgttcaagtcgagatgatcccttctcgacgtgactcttgttcacggtacgttccgtgccttggaaacctccacgagttcgtccccgattaaaggttggatcgataccgacaccttcatgcaatctcctgcaggcactctgagcgtttcccctcggtttctgctcctgaaacaagccttgctctgccctgcgtggcattttggtctgtggggtctcttctggggtgaggggcagctgtaagagtcgtgcgtgataggttttcagctcctataaaattccccgatgcaggtcttttgtcagggttgccgtggggtgtgtttccgatgatgaggtgactcgacctgcctttcgatgccgtctaggtgacagtcccgggtatggtcgacgcccgccatctcctcgccgtcgaacctctctaccgagattaccttcccgttcgaactgtttgatttccctcttgacatcatcgtgtccacctcgatactccctacctatcgagtgaaaagactcggatcggggaccgaggtcgaactcgatcgtgtccccgtctctgaacgatttcggggctagagcacgagcgtccacgttagacaagtcgggtcagttgcatgtatctagatagacgagagcgatccggttgatccagtcctagtcctacacccctctagaccagaggccgactcaccatgcatgatatattccctgagatcgagcatcctcgacagatgtaccgagtccctgacccattcttccgagaagatctagagtacggtgcagcgcagtttggagggtgagctcggagtggaagggtgtgccgcgcagggtgtttgaaaacggtaagaaagaggcaaaggaagtctcgggggagggagagaatgactgacaaagagggtagacgtctccgagttcctatccaccgaacccgaggcctctcatcaatcacgaacatgacctccaggggtcgggtgtaccttgctcacgttgggtgatccaaggctcgatcgtcttccttgcatagaccgacggcttgttcttcgcaaaagaccatcttgctcaaggtccacgtcctcgacttgcggtccaggtgggtttgatcatgatcgcgtctggactcgggatggtgagggtgatggtgataagaacaatggtggagatgatcaggatggcgagagcgttcagagtccgaggtcgagtcgtaagtggtgtgagaacgacttgaaggagagttcgcgctgggtgaaaagatggtcccgtcgtgtgatgctatatgagatgatcccgaacacccgatcccaagctcccgttcagcgagacttttcacttgggacgagcaagaagaccatgcggggctgctcatctcaccccatgtcctcctaacttgctcgtgtgtcgatcgtgtgaaataagctggaaggcgggtaggcaagtccccgccgtggatgagtgagtgtcagtttggcgttggcgtctcacgtgtgcatgcatatcgggcgggggcttaccggggggtaacgtgtcaaacaagctcatcgtgggcgggacgggacgatcgtcgaggtcaggatggtcacacctggatacttcacgagagagaggttgtcacgaggctgtttaaaattggatgaggattgacaaatgagcaaggtgagcaggttgatagtttgtgatttactcgacaagttctcctctttttcggaagcaaaatccgcacaaaaacaagaaaatgatggaaataccaagctggaagtgtcattttcgattcgaacaacgatgcagtccatagccataaacgtccacattgataccgtagatatgataagattcagtgctgtcatgtatacttgtcccatgatggtatggacgctggcctggtctagtcatccccgttcgataccatgtcatcgatccttcccctactacgtgtttcacatgcacttttcctcatttctttcccttttttctcgcgctcttttgttcgaaacaacaatgtcgctcaattttggattcgggtagtctcctttgttcaaaggtctcgttcgacatgatcatatccagccatctacctcgtaatctgaatcttgtgttctgtaattgaaacgggaacacatgccaacgccacgacgaatcaggtcatattactcgtgaacatttccttttattcctgcgcgtcaacatttgaacagagggggaacctcttttctcttcccgaaccctgacgttcacgactccacctcgaacctatcgtcgactcgccacctcgccaccccgcactttcttgtgactcgccacgctctagctctagctccggctccatttccatttccatctgccactttcctgcgacacgtcccaccccgagccgacgcatcgggcgtactcgtacctagatggcctttttcgatccgtacaccaccatgacccagctagggatgatggttgcacccgggtattcccctgcgatggggatggggatgatgagtatgatgcctgggatgtcggtgagtatccatccggacgagccttgcctcggggttactctggtggcggggtggtgagtcgagaagaaactgacgtccattttgacctccctggtttgtattgtaccgtgcctaccttcatcaacccgcttcatccgtcctacaccgatcgataccgacactaccacccggggtgggtgcgccggacatgccagggtctcggctggcctgtcatgggtatgagcggaccatacggggtaagtcccccgtccactccccctgtttcttcgttttcatgatcgtcccatcccacccgtccgacctggtcaaatggtagatggttggagacgtcgttgctcggccatcgattgccgtcgtgaccgagacctagaccgagtccgagcccgagcccaagcccaagcccgacactgcgactgagactgacgacatctcgtgccgttacaccgctcttacgggcactccctacccgtcacacgaccttccatctgcttggaatatcggacctttatcttgaaaatgtcgacattggacgacggacttgacctgctctgacatggcgggtgtcatgttggacggacggacggacggacggacggacggacggggatataaaggcgcctcgttatccagcaggagggtaagcactatgaactttcgctcctgaccctcatgcccagaacagctggaacatcaggaaaacggaatggccgctgatctaaaacccccccccccccccccccctttctttcaaacaaaaacaaaccctctcccacctgcattttgcggaatgacttgacgcacatacacgattacgcaaggaccgacacgaggatgaccgacacacagagcatgacgaggaataaaacgacgcgatgcaaagctccttttccggatcgatttccatacacgaggaaacagagatcgactcggatgcggatcgagattgatagctcgtacgattagctggggatcgcgagtggctagggagacggatagcttgggcgctgttacatgcgcatgtatgtatctatgacttcttgattcccctgggaggatcgatgactatatgcgaatcgtcgacgagtccatacgagcttacggatcgagctctctgatagcagtgcggatttgccccaggtcaatggttggcggttggtgcgcccagaatctgatcaggggtaggtgggtgcatgcgtcgagctgggtatttggggcacccttattgcaccgtgaccagatccagaaaccgtttgctcttgacttttgtcgatctctcactgccaaaggtacaccttgattgaccttgtctgtacgcaaagcatgaaacgggtctcacggtgctcggcggagtgggaatgacgcgagcaggcctcggtgagatgcttccgtgcacgtggctggtgacgtcgtgatgtcttgtggcgtgggagggagaggggcagcctcgggcagatcgaatcggggaatgatggattgatgattgatgatcgaacatctactaatcacagagtagactagctagaagtggtgcaccatcatctaatgagccacatcccctctttcggtcaggttcatcgtggaggtatatcaccaagcactacgaaagtgcaagtagctccaagtatacataaatcactatcaaactcaccatcccacaactcccatcgcatagccgagctctgtcccacttgaatcaacaacccgcttcacacgttcttgaacatccctacccactcaaccttcaacctcgtcaatatgccttctaccaagggaaaccccaccgaccccaagttgcacgacaagatcaccgaggaagtcaagcaacagactaacaaggatggcaagtcgacccccttcctgcccacccgcatctccaacatctcgctcgctccacccgaccttgacgtcctcgcgcatcatgtcgactgacgctgacacgcttgtatatgaaatcgtccttgttgtcttgcaggtagcggagctggtcagatggccgcctggaaagcatccaagatagctaaagagtatgaagcccagggcggggattatgagaacgaatcgggaagcaagaacgagccggaaaaggggtgagtcattcatgcaatacgggccggtttcactcccaacccatcccatatcacttcgtctggttcgacctgacttggtggataaagggcttgagttctcgagggcctgatcagctaattttgtggcctttgtgaaacagcgctcctcaacacaagtcgggtgccaaaaaggctagcgagacgaaatctaccggcaaaaagacggagagcaaaaagtcggacgacaaggacgctgaagaggaagatgacgatgaagacgaagacgaagacgacgacgaggatttcgagggcgatgatgatgatgacgaagatgacgtggcagagcaggatgacgacgaagacgaggatgacgaagacgaggacaagtccaagtcgaaatccaccaactcaaagtctcagtccaagtccaccgccggcaagcgaaagagggtgagtcggagtgcgaacgagtcgcacggcccccgtcagggcgggcggtgcgaccggactccgaagcgatcgacccgggctgaccgtcgcgttgcctccgtgccttgtcgttgtaggccgacgaacccaagcccagcgccaagaaatcggacaagcctgctcctgccaaaaagtcagtcagtcctgcgcacgacgacctccccggccccgggattcgcaggcctaaaagactgatcgcttgtcatgatgataattgtttcttcgcgcagaaccaagaaggctgatgacgacgaggacgaggacgacgacgaagatgacgaggacgatgtgagtctaacacagccttgacgcaagtccggggtcgacacgagcaagatctgacgatcggttcaaattgcccttgtgcgccatgaaggacgacgaagagtacgatgaagaggccgcggacgacgatgaagacgaggccgtcgccgaggatgacgaagacgacgagtagatgtataacatcggaaggtcgttccgcagaaagcatctgtatgtctagatgaaatggttgtagtagtaatcgaatctatccaagtgagaagaaagatgtgaagatagaccgagcagaatcttgtcgaggggtgttcgctctagaccaactcgccaaacacctgttcgagtcgtttccagctgacgacaacctcgtcctctttccccttgaagtccctatcctcgactcgtcggaagtctagtcgataggactgtttgtcgagcgagaaccaggtagaagggagcgggtcgacccggagtcgcaggtatggcgaggcagctgcaggacaaagtttcatgtggacaaatacgtcagtcacctgtactgtagtactctgggaaaccgagaaatgacccactcgtccctcctcgaatgagacccggatgaaccctctccatctggatatcccgtggcaagccccatttgcccctccacatcccctcggcagcggtctcgagccggatccacgactctcccaatcgttcacccttgggcacgtctatccgggtcgggatcggtactagcaggagaggcgtcttctgaccgggaagtgatgcgtcggcgatccgtcgcatttgagtaagacggcggacgacgcgggtggggtagtacatgatcaggacggtgagtgttccgcccagactgaggagagcgccagagaggatggattcgggggagatgatatccgtgagcggggagaacggagaaggcgccggtggggatgagaggtctgttagtggtgccgagggtgatgttgatgatgtcgtggttgatgagggtattgtcgagctaccaggggtggatgccgttttggcggcttgttcttgctccatcgccgcgatcttgttgtccaggtcgagctttagctggaccgtgtcagccgccaagaagctgccaacgtcaatcgcactctgtcaattctcatagcatggcggatggtatcgatctcggggactcaccacccgggtaccatggccactggtcatcacctcgaacgaaatgtggcagccgcacttcccgtcagctactcggccatgtattccatgaagtctcggaagactcacgcatgacgacccatagcagcttgggccgaaagttgagcggtcgagcatagatagtcctttcttgaatcagctcgcttgtcttgggatcccgggcgatggtccgccatgggaaatctcgggacgatgcggtagacacgctcgaggtcggcgcaggagaggttttggtaggtctcgccgttgaaaggttgcgtgccggtgttcgcactagctctcggaagaggttccgtgtgtacctgttcatcgtcgagctatctattagatccaggaggtacgtcttgcagactgcgatgcagtgcgtcatgaaatggtcaacatgctggtttcatcccacttcatttgaactttcgtggtccgctctgccgcgccaaaagtcgaaatcgatcgctcgatcagtgtaaaactcggcccatgatgacctcgatggcgagctcaatttcagctaaaaaaacgatgcgaaattttcctgaggttctgcaagtacacgagcctcttcctattctctcagatcaacggaatttggtcactttcaagcccagttgatcatagcaaccttgcctcgagtcaccgccatttttgacttgaaagcgcaatccccgagtcaagcgcgaaagagagcaactaagctaggcgagaatccatccagaatcatattcaaacctattcgacaaagccatctcctcaaaccacatcccaatccagacggcacacacgggcatacctaaaggctagaagttaagtgcaagctggaactgcccttagattcctgagaaagctctcaagatgagctcggtgagcaccgtctcgccacattcgattcgacctggaacaaagaactgacatgtcgcctccacatccctcgacccgtcgacccagtttcaagctctgctcgaacaaaaggctagggaaaaggcccaaaaggagcacatcatcgcccagaaacgaagagccgaggaagagcgggtgaaagaggagaaggccgccaagctgaaggtgagcttgatagacctcttccctcggtcggatgtgacgtcaggcatctgccaacgggacattcctgattcggactttcattgaactttcatcctcgtctgggtttattccaacagaaacagaaacaggatgaggaagatgcgaaacgactgagactcttgtcacggaagaaggaactggaagcgaacgacagggccaagaaggccgccgaggaaaaggcctacctggaacagaaaagggaagaggagaggaagagggtcatcaaggacaagattctaggtcctcagaaagcggtcagtatccctaaatcgtggtgtttctctcctggaattgtcgtctgacaggatttctctcgaatgggtgatgagcagagtcattacagcccgatgaccaagatcaaacaagccgcatcacacccctctctcgctcgtcctgcttcagcatcatcgagcattgctcccacaccaggaactccgggttatgctagccatcgatcacacgcctcttcctcatccaacgctccacctcccgttgtcctgacccggcaggaacgtaaagcgctagcagaagcgagggagtttgggctcactccgggggccaaagcggcatcgacaatgacccgtggaggatggagggaaggtggaaaggggaagatgacgctcgaggaagaggggatcagtaagctggccaagctggcggcggaacgggcgggtctggtccccgtacctccaggtgctagggcgaatggcaaggggaaagaaagggagtcggattccaaccgtcggacagtcggtatcatagggaagaatggggacaagcctctggatcgatcaggatcgacgtcagcgggaaagtcgggagaagggtcgtctcgacggaacttaccgctcgaaccgaggaaaccacgacagatggaccgggcatcctcgttaccttcccgaactccatcgaaatcatctgttgatccgcgatctgtatcgtcctcatcatcacgccctacacctaggaaaagacctcgttcgcctagcccagactcggagtcttcgttggactcggacgatctcgaccggaacgaacgaaacagacggcgggtgacgggtaaagggcgcgatcgagatgaagggagagggtcttccagtcgaggaggtgcgggagcgggcggtgggatcttggcgagtctcgggtttgatccgtatcagagcttctctcggagcggcaaagatcgcgcagagtacgtcgtgctcctcgtccgctacttttagaatctggactgataacttcattgtcctcttcctccctttctcgccttccccccctctcaggtacatgcggaatcctacctactcggacgaggaatcggacatggaggccaatgcggcgacgattgcaaaggaagaggctcgggccgctcgtctggccagggaacaagacagactggaggaagagttggagaggaaacgaaaggaagaaaagctgaagcggaagggaggcaagtaggctccagtatcacctctgaatctgagggtttgatcaccggcgttgagtaagcggcaacagtgaccgctagattgtctcattagctgtatcaattagcaatcacatcaacatcatcatctcgcatcatacaactgaatgccagtcaagcgacaaaatacggcaaagtccctttgtcaattctctgcccatgatagcaacaccacacgcaacccgaatcgtccgctaaatcctactctatgattctcaaggcgtgctcgtaccctcgagggtttaccctacgcctgcggaggccagccagcagctagactgctcactattcagtccactcacctgtggctcaccctgccgtggtactgtggattcctttgttcgaagctccgtgtacggtctccctgctctccctcacgatcggcaggcgactacacgcgggcggagggggaatactgagccgacgattctccctcatatgccgtagtgtaccagtctcacgctgcacgaggcgatcgttcgctcaggggtattcgggagatatatcagacccacgatcagcctcgtatcccccttcaggatcttcgagacaaaaggaaaccttgtaagccgcttgtcaacctttattcgccggtggactggcataaaagatatatccattgtggcgccgcattgcattttcttcaggtcggtcggcgtgcaagtggataccaaagcaaaatgactgacactttgccatacaccgaccacttcgcatcaggtcagggaatgtacaaaggtaagcggcatacggcccaaagccgacttgcgctgacattgattgctgcctcgttgttagagtttactgccgagcgggcggctcatgaggcatcggcttctcccccagagatgcattccaccacacgatcgctcaagcctcgacatgcagtgtccctggagaacatgtcagaggaacacgagcaagatctgttgggcgctatatttagggaacacgaagttgtcaaccaccagaatgaagccacggcagccatacgaacacaaggtccgactgcggtcgaggtcacccaaaatgcaatcagtgaagtcgcagccccctcagtcgccgagatcctgctccagaagggcgacaaaaaggggaaaaagagtcacgctcgaaaacagcccaacggtcacatcccgcgtccaagaaatgcgtaagcggagcagatcccgctggagactattctcgaaggaagggctcatataggctcttgaaaccttgatagatttatattgttccgaaagcatatcacagtaagtatgtctatgctgctgcgtcggattaaggcactgctgactaggaagtggacaggacaacgatctgatcccgcccagtgtcgaggtgaaacaccaaaacatcagcgtagtcgtgagtgagtttcactgtgatttcgttcgcggggtatcgcctgacagtcaaggagatctatttcttcaaggctgcgaaaatgtgggcagaagtaagttcgatcgtagaatggacctacgttccacgacctaaaagcttacactgccgtttcgattaggccccacccagcgtcaagaccgagttcacggaggcagcgcgcatcgagaaagcagaacacgcaaggctgtcagtggacccgtacaacaatattgcttcgaattgaagggctaatatatgagccttgtcagctatccgaactatcggtatcagccggcttatcggcgaacggatattgtcagagtaagctttgctagcgcgagtccgatgaatgtatgctcagtgtgaccaacgctttcagcgacgagtccggaaggatccgatcgaagatcagaaatgcgatgcagtggccaatcttctgatccaaggggcttctggagatcaacttgaaaccgaagtcaaggagaccctggctcagcaagcaccagagcctgtggcgccggaacagatcaaactcgtcaacaaacgaggtcgacggtcagtcctcatctgctgctgtctagtagtcagatatgctgacgttctgcatatcaatcgctagacgacgaaaagatgctcctggtgaattatcgaagggagcggtccgtgcgcaaagagcagcggcgcgggcgaaagcgatgcgggaccagtggatggacaccaacatcctgttgaacggaatgcaggcgcgcaatatggcctccaagcgagcaacactggacaatcaacacatcggtcgacaatttgcgggacacccgatgtacttagacgcgtacgacatgcccaacgacgacggtctctacgaggagggatatgagatgccctacgaactacctcccgaccagtatgatgacgagatgttttaccgccaagcggcaatgcgagctcccgccctgaacttccaccctgacgaccaatttagcccactcgacgatcgacctggggagtacatctgggaacagcagcaatttggatgtatgaacgccgcacctccgcttcagcacccacaagactatggaatgttccagccgatacaaaatcaagctcgacagatgggtcaagcagactttcacgaaacggtatatcaccagatgccagcctacccaatggacacgatcgacggaggcaggttggagaccccacgcactgctggtcgcttcgatgcgcaacctgtcgagccgatgctcacggcttacttgcccccggatccggaacctgaagccattgcctatggatatccgcctttcgattctcctctccaggctcagcagaacgacatcgatcaggctcatccgtttttggaacctttgcctgataattacggcacgaccgggcgccccggcgacatcatcgcaggtaggtgggctcagcaggtcggccaaacggactgggacctgggtgagacgaacgatttcaatccacactatgaggaggacaacgctccgttcccagccggagcaactgatgagcaagactcgaaagaaccagcagggaactccaacagctggttccccttggtcgacaacaacgtcttgcccagcgagggtattgatttcggcgagcagcctcgtcttttcgatgggatttgggaacaagagcctcctattcttccgctagatcccgacatggaggactaccagcaagcggtaagggagcaggaggaaatgcagatgctcacagccagatgatacactggctcggtcgtttccgcgatcgaagctgtcgtgacaagtcttgtaccatgggatttaacctagatgtaaattgtaatgggtaccaccgatgaaaaacctcgggtgtgattgacgcgcggccaggttctggttgtttggtatgcatatcgtctcatgttgaccttccttgtaatacagtggaaccattgtgagtcccgtgcgctgatcatacacggaaagaagcctagagagtcttgacctcgacctcgacagcgttgtgagcccttgaacctcggacgctttccaagaaccggtaacggtgagccagcatgtgggagtaagctgatgtcgtcgcaccggtcgtgatataggcggcgttgttgagagtgtagggcgagtcggtacgaatgacctaaagtagcgggtcaatacaattctgagctaacctgttagcagagtctaagagcaagtcatctgggcttacggaaccgatcgacatgaagaatccgaaggtagcggccgacgacaacatgtactgggacaaggtggccaatgctcctcgaggacctggcccacccctgataacgacaggtataagagtcagccgcagtcgagcgatatagatgagctatagatgtcctacttcaagatgctgaaactaccgaaaatgaacccgatggtgagaccgacagatcctatcgttacaaccggtctcggtcagccatcgtgatctgcgccgctgagacatgagaataactcacctcccatcacagctcccattttcactgttcattcatatgatcatgacgaatctgtgttgagctttcgtacccggtttgcttcacgggcgcgagctggactgactcttctgcaggacgccgccatctccgatcgattgctgtggtgggggcattttggatttcgattcagacttataaagacgtgacttgttgtggttatcctgcgtgagtgccaggtacctcctctagagatgtcttttgcctcgaaaggttgtcgagttggaacatgtcaaggtccggctgggctcttcgggttccgcctatgtcggattgccaaattgaagcgcgtgaaccggtaccggcgttggtcaatcatatccatgcacaatctaccctttcgttacgattgataacctcgatcacccattaacaacaagctgcgacagattatcgtgcttcctctctttttacaagttacaatgagcaaatctcctatcacttgccatggtgagtatactgtccgcccaaccgatgtctatgcctctaacgtttcgtcaagacagtcctagactcgacagtgggaaagcccgcgaaagaggtcaaggtggagctattctcgatgggttcttccggcttcacttctctcgcaaaagggcaagtcagggtccaaggaaactcacgattcgataaggaaatctgattattgggtcgtgagcagacaaaccgataacgacggaaggtgctctaccctgctagacccctcgaccaagctcgaagctggtatctacaagatgcagttcgggaccggagactacttcgagaccgtctcgaagcctactttttacccattcgtcgaggtgagctggctttttggaaaacgagaagaccggcttttgatccccggagctgatgtcgtcatactcctcagatcgtgttccactatgaagatccttcgagccattatcatatccctctcttgctttcccagttttcatacacgacttaccggggctcttagatgaagagacctccatctttcatactcctactcatcctgtagcaaggaacttggttgtaaacatgtttaaagcgatgagagaccgctcaccgctgccactacctattcacccagctcgtcgacgcgatgccgtaagacgcgcttgaccgacatgaccttgcgagatcaggttgcaggttgggtcgagatatgtccacatgaccccaccgccaagatgccaacctactcggcatctcgacagtaccggatcaaatagcagtaccgcaacatagttccagcgggatcagttcgtgcatcattagtgatggctactccattgcaccagcttttcgcacagtccgttcaagcacagcgaaacgatgggccgtcgaaggaagctctactggatgcgcaggcagggctagcggctcaatggtcccgtgcgacagctgcgacgtgggtatactacagtaaaggatgaacaaagatatttgctgaagtccttccactatgaacagagctgaagagctacgcagtgatgaaggtgatgcggctcaggcggaatacgactttcagcaacaagctcagctgtgggacttgatcgccaaagtcaccttgttcgtgtcgcctcttggtggcttgctacttgctgcactaatgcttgcttgggttcatgtagggctcgggaagtacaacagccaatagggatcaagccggaagatctgctagaacaaaatagatacctctcgcccaagagcctcgtgaacgccatctacaattctgaccggacactgcaagaatggaccgtaagcctgtattacttctcgactaggtggatgaggctgaaacgatgcatccggcatggtaccacagcttatcaagagcaatctcgaggcattcgccgaaccgtccgaaccgacgccgtcctcttcaaaacgtgccaaatccagctaccgacacgaaacgttgcaagaagcgaggcggctcaagaatctccggataatcaatggttcgaatgcggctactagcctggacatagacgccaatgtccggacaagaggagtgagaggagccggggttctagctggcaaggacaaggtgagtctggcatgccgggtcagcagctactaggctcgaccaaattaagttgcatttgactatacgtacaggctttggaggaaaagacggtggacaaggtttatcaattcattcgtgcaggaaaactggacgaggccgagacatactgccacgagcatgacgaaagctggagagtagcgagtataaatggaggaaaggcatggggcatcgagattgttgacggtatgtcgcaaaccgtttttcgatccggaattagcacaggcacttacaagcacaccagatcaagatattgatatggaaggtgacggtaatgaggcagttgttaccggaaacatgcgaagagatctgtggaaaaagacatgcaaggcaattgctacgaatgtcagtcctcaatgcggacgtctgggcgacgtactcgatagctaaatatgatcaccaacacagccgtcgctttcaagacaagaaagagctctatatgcgtgtctatccggcgatctagacaataccttgccggcctgtcatacatgggaagaccatctatgggcgcacctaaattcgaagctcatcgttcggtaagatatccgaaattccgatcaatgcaaaatccgacctgaccttctcgacacagattggacaccaagctcgcacaactgaccggatactggcaagatcgatatggcgacgactcggtagtaccgtctggtgctgccggaggggatccgatgaaacacttggcagaggtgttcgatcagatcgagcattgtcaggcggatggcgtagcgtgagccgactttgaaacctgctcctcctgtggtacgacttgaaccttgtccccgtgcacagagaccaagcgaacgaatggtataacaggatcaagaaggcgatcatcctgggcgacggcgagactgtcatcgatgagtttgttgaggattcagaagccattcgcgaggaggatgagatgtgcgtatttgcccgatttacccgaatatcaacacgctcacctttatcggatagtgcatggacgacgctcaatttctttatgacccacttcgcgctataccgacggtcgctcggactccctgtggacgaagacagcattcacacactgctcgaggcttatatcgatcagcttggaggactgcccaaggccgactcgctcgtcgcgatctattctgccgagctcgagtctggggatcgagaaagggcgtatgctaaatacctcgagtgtgagtcatcaagatcagcctgcactagaggcatccaggctgatgaatgccgtcctgtcgaaacagtggcttctgctactgaggatctctctttcgaaggcaagcagcaagctcttgaaaaggctcaacaagaaggcttggatgcgcggaaaattgcgaatatcgtttcgagtcgggttggagatattatagatgtgagcgcccactcgaccgttttgcaagccatcatacgctgatagtcacacatccaaccagttcacaatcaaggagatgctcatccgatatcatgcctatcccaaggtgcagcacggagatgccggtcggcgtaccaagggcatcaaccaatcggtggaatggcttctgtgtctcgactccacgttcatcgacgcagtaaagctggtcaacaaattcattcgttactatctaagtacgtcaaccgtcagattgtttggtatctgatcctgtcactaatctttgctcgtctcggcagtctccgacaacgctgatcttgccagtcgtcttcgatcgactctaccggatgactttgtcgaatcatttgagagccttcacaaatcgcacgagatcgagatcatggacttcgatcacctggaggagttgaaaatgcatttcgagctcttgaccgttctggaggagctcgctcgattcgagaagctctgggctgctggtgtcgaggagatgttggggtgagtaagatccaacgattgaatcgacaatttgctgattatcttacaacgagtagcttgatgctctcgcaacaaatggcttgggcgaatgaacattcggtatgtcttgtctttgataccttgtttgctttcaattattcacaatcatttcgatcgcagagtcacatcgaccttgttcaccgggccgtactaaagctcgtcacgcttgctgatgatgtagcattaacgaattggatcgagtaccttcctgatggccaggaagccgatgaacgtaagcagaatgacggccggaattccgtttttggcgctgacgggacctcctggtctatcaggccacaagctacgggccatgggatatgatcgactgaaaaagatgcatttgggcgatatcctgttgcgattacacgacttgttgcgtctagcggatgaacatcttccaaagtgcgtccagcctgcaagcaatggtctctgctgaactactctgatatactctactatctgctctgcagcaatttgcaacgcgcgatcgacttgagtgcggtcgtggtcgatcccgagaccgagttgcacgagatcttgatacagcaggattacgacccgctcgagtcggaagctggagagccggaagccatgtggatggacgactatttgatgaggattagggaagcagtgatggaaagctatcgacggggtagcgtcactgggttccaggttcccggtgtaaaggcctgatatgcgtgcagactatatgcatgatcgattatatcaacctgtctgctgtactgctttttgagcttttgagttccacccgtttccgattgtgaaaagtaccggaagttccggctacttgatcgacctttttgttccggtgcatcggagcttttcgtgcactctcgcttgacgccaaagttggggaatttgggttcaacctggcccatgcgacgaaatggtcttggctctggctctctcgctttgtctgcccgggttttgtaaaatcgagatcctacccagcgacctgatctgatcgttacaaaagacgagagcatcaatcaggaccaaggatcgaccaaggctgatctctcgactctatcgctttgtcaaaatcaacctcttgctcagctgcccgaatcgatccgcgccagtgtggtatgtatattccgcgtgcaagtggggtaaccgcaaagttgatgtcatgaaatgctcaccctcgacgtggcccatcgattggcactgtagtcttcagtttcttcgaagtgaaccgaccaaaggatcctgaactacgctcaccaaggtagcacgaatcaaacccatcaactcgcgctctcatcatggtttcggtcaaactctcgctcattcccaactttgcgatctgggaccttcccaacgaatacgcccccactctcccccttcccactgtcgacaagtcctcaatcttcagtcgagctccgtttgccattcccgaggacctcttcttccgatcgctcgactacaaatggccactcctccttgcttcctcctatgtcctcatcgtcaagacctggaactatgtcaaccgccaacgaggtggaaagccatgggcgatcagcaagacttccagcttcttctggttcatgatcgcccataacgttttcctcgccgtctactcggcttggacctttgtcgggattgtcggtgccgcgaggaggagctttgagaacccctttacctcgccgaacgggttcaggggtaccatggactcgctctgcaggatgcagggtacctcgggattgggcaacgctgctatctacaactcgtccccctctgtccagtcttggttcaagagtcacccgctcaccgcaggagccacccagactgctgtcaacgcctacatccccaagcctgaccagctcggacgactctggaacgagggtctcgccttttacggctggtggttttacatttccaagttctacgagttcatcgacaccgccatcatcctcctgaagggcaagcagagctcgaccctgcagacataccaccatatgggcgcttgcggttgtctctttgtcggaatcaagtacatgagccctcccatctggatcttcctctttttcaacagcttcatccactcgctcatggtaaataggggtctcatcctggtgataatatgcggatcattgatgcgtttcgcccttcttgcagtacacctactacaccgtcacctcgttcaacatccgcgtgcccaaagcgctcaagcgatcgttgactacggctcagatcacccagttcatcgtcggtggtggatcggccctgcttcacctctttgtctactacaaattccccacctcggccatcaagtctgccgtggggctcaaggacgacccttgggtgccttgtctcgacaccagcgcgcaggcctttgccgtctggttcaacgtcatctacctcactccccttacctacctctttgcgaggttcttcgtcaggtcgtacctcaaatcgtcgaccgcgacgggacaaagcaagaagaaggacgtcaggtctacattgcaggcggccgagcgagccggcaaggacgccgtcgaagagtttggccgggccgaggtcctggagaatacttctgccggcaggtccacctcgagcgccgccgtcgtcaatggtaatggcaatggtatcgcttcgaggaaaggatgggagaggaccaacaaggtcgtcgactgaaaacaccagcgtagattcaatgtcatgccgagtcgtctacgacgttgaaggcgtctagaccgggcacaaaaacgagactatagggacatggatcaccaggggtctttacgtgctctgttgactatgcgttgtgaaaagctgtcgtcgtcgtttcggtcgatgaacaggcagatagatgtccatgttgcatattaatggtgcggaacccagcacggaacgattcgcgcattggtgttgtggtacttttacttttcgcggcctgatggactggaattaaattagcttcagccttattcacatacagtagagtcagacctggctcgttattgaaagggtcggtatatctgtccatccctcgacatcgactgtcaaggtcacatagaggctcgcataacaccttccagactcgtacagactaaacaatcctggcagatcaaacaatcgaacgatcgccaacactcctccaccaaatcaaacggaggtcatctgaatcaacgcgccgatctcggtgaacccatatcgcacacgaacctttcatctctctaacctgtaggtgtaaccgggagcaagaccaagcaggcttggcaatgagtctcagtcgtcctcaaatcatttgctgtcagaatatcaagtgtaccctctacaacaccgcaccatcatggcctcgtcatcaacaccgtgagtatcatcggcgtgacatgcttaactgcgtaacttatcgttcctaccgcttgcttgcgccagaaacggggaggggcaaggggactggaggagtcagctgaaggcaccaccaaaagacatgcgacctcaaaccgaggtgagttgccatgttgccatccattcgtttgctagacggctcacaacccggttgtcgtgacgcgctcaggatgtcttgaacacgaaaggaagcgaattcgaggacttttacctgaagcgagaattgttgatgggtatctttgaggctgggttcgagaagcctagtccgattcaggaagaggctattcctatggcattgacgggacgagatattctgggtgagcgcgatcactgcgtgtccctgtacgactgcttggctaacttggacaatgactgtagcacgggcaaagaacggaaccggtaaagtcagtcggcgtgactgatgtttgaaatcgagcaagcgagactaaaccaagtactgttcctgtcagactggagctttcgtcattcccacattacaaatgatcaaccccaaagtaccccacattcaagccgtcctccttgtacccacccgagaattggctctccaaacatctcaagtctgccggactctcggtaaacacctcggtctcgaaatcatggtcagcacgggaggtaccgggttgaaggacgacatcctccgactaggcgagaccgtccaccttctcatcggtaccccggggagggtgttggacctctcgtcaaaggggattgccgacctgaagcagtgcaagatctttgtcatggacgaagctgacaagctgctcagtcccgagttccagccggtcatggagagcctcttgggcatgtgtcatccggagcgtcaggtcatgcttttctctgctaccttccccatgctcgtcaaggactttagggtgagcccgactcctcacaagtaacatctgagacccggccatgatactgatacgggatactattacaggaccgaaacatgcgcaagccttacgaaatcaatttgatggaagagctcacactgcgaggtgtgactcaatattacgcctttgtcgaagaacgtcagaaagtccactgtctcaataccctgttctccaaggtgggtttcggcctacgtacagtcacactacctctgaggctgataatatgttatgggcgttcgatcagctacaaatcaaccaatctgtcattttctgcaactctaccaaccgtgtcgaactcctcgccaagaagatcaccgagctcggatactcgtgcttctactctcacgccaagatgctccagaaccaccgtaaccgagtgttccacgatttccgtgccggtgcctgccgaaaccttgtctgttctggtgagcctccgtcgccgagtccgtcctcgggaggacagaggactgattctggtttgggaattacatagatcttctcacccgtggtatcgatatccaagctgtaaacgttgtaatctcatttggtgagtccctcgcacccgaacacctcctttgtgccactgctcacaacccggcttgcactgcggcagacgcccccaagactgctgaaacatacctccaccggtgagtgtcatacgtcgcacattagcaagcgtcattccgtactcacttttttctctcgtttgtcagagtcggacgatctggacgattcggtcatctcggtctggctattaccctcgtgacggtatgtccgatcggcggtaaacagctacagtcccagctgactttagctgattcccttgaaattgtagtacgaggatcgacactcgctctaccgtatcgaacaagaactcggaacccagctccagcccatccctgccttcatcgaccccagcctctacgtcgcgccttccggtcagcccggtcactcggatgaggacgccgcacttgcccgtcaacagcgacagcagcagatgcagcagcagcagcaacaacaacaacaacaacatcaacaacatcaacagcagcagcagcagcaacagcaagctatcttgcctccttctggcaaccttaacaccatgcgtgcgcctcaggttcgcgctaacgtcaacaatggctacaatcagtgaagaaactgtctgatcgcgccgtaggagcaggaggaagtgctcgaagatgtcatcaactggcagtggaaggtcaagcggctgtccaggcatgattcgagccatctgtagtaagaggttcgatatggatatccatgccatcagtcacgcgcttgaaattcgataaaggatcagtggcggatttcaagccgtagcatcgaacctccggaggtgtctcgcccatatacacatgtttaacatcctctaggtctcgaatacatgatacacgctaactgacttttccgtaatttgactcgctttctttcaatcaatcataaaggatactgcgtaactagtgcatcataggggttcggaatcgtctgtcctgtcgtatcgtgtcgtatcatctcgtgtcgtcaatatgattactgatcgtcctccgtgagagatcgatcgtttcaccatcgtaggctttcagggcctcagtcatttggttctccagtttcctccgaatcgcggtcttgtcgtccccatcgtcgacacgctttcgttttcgcgagtcggctgcggctctttccgcagctgctagctcttccctagcccgacgaagccgatccgcaacgtcatccgcttcaacagcttcgatctgaggctctgcatcccctgtatgagcactgaatgagtaatccgaaagttcgttcatataatcaagctcatcgcttacgaggaacgatatccatggcttgaagcattttcttcgaagcgtagcggaggactagcttgcaataaggggcatccgccgaatctagtttttttcccggcaacgtatgtgtccattctttctaccctcttgatcggattgccaaacctataattatcaagaggattacaccgaccatgagcccagctgacggcgatcagggcctctcccatccgtatctcactgagtaacggtcgtgagggttcctttcttttttctctcggaaatagtcgaggtcatcacaggcggagtaagaatatatgcggacttaggttttggctgtccataggtaacgcgcatgatgcgtagctcgatcgagccgatcgccttgagcttagattcagtatgttctgctcccagatgaccgtcatcctcctgcacattctgcgcgccgcaccaaaatatggtttagcgtcggttccaagtctggaagaggaagtggactcgccggcttctcgaacctatagggccattgctcgtgtggactcttatctgggccccacagagcaatcagagcggggtgtttctccaacacggcccgcctctccgtccgaatgccgtcaatccaggcatgaacgctgatatctctgcattcagtctggttgcgctctctggacgcagacacgtctaacgagactctataagtctttgatacatcgtcgattagtgtcgccctcgcctggctggtggacgaacatcataccttccctggctcactacaggtccaaccttccgatttgtttcccgagggctgatcgaggtgtttgacctgatacacgggcagatccacgccgtctacctgaacggccattgagaattctccattggaggacagtaatggcatggtgaatcaaccgctgcaagacgtttcgtcctatatcgattcgagtcgcaaggccgaggcccgcttcatcaattgccctgtcagccgggagaaaaaaatacaagaagctggtgtagtggaccgaagaacactgcacgttctaacttaagaatactgagtgccaaggaactcttgcagttgagcaatctggactccgccctacgagccctcgatatgttaacgaaagtggagtaatagttgaatcgttcaactgatcaaactgatcagctgaatgctgctggcctcggcgagcttctcgggaaacaaaggttccgatgatgggaggatttgcttccggttctagaccaaacaataacaaaccctaattcgagatatcgcatctcatcattcatcatccagctcgtccggtagatcgataccttcctcatcagtagcgactggtgctttccggcttctcagtagacgacactagcaacgagtgagatatagatacactgcagtctagactcccttcttgtgcattcattgtcactcgggatttacctagatatcgagcggaacaccatcagacactgagcgtgaaatctagatccaagtatcgacatgacagccgcctagaccgaacgtcgaggagacaagattgaattcaccatatcattatcatagtaggggaaatcatcagagacaagaaccctctaaagctccagctagcctcacaatccggagaagctatggacgtcactcgccgggccctgaagaggcaggaagatgccgcagctgatgcagctgcacaggccgagttcaatgagaagaagtacgtcccaggccgttcgtttacatcagatacttctcattgagcctcaactgctactgcgtcattgccggaacaggtgggtttgggtgccggacgagaaagcaggctatctgccgggttggatcgtcaaggaggagaaatcagatccgacacagcctttgagatcgaacaaggcgaaaggagatgctcaaggcgattatctaccgatcccatcgactaggcatggcaaggaaatctcgctggaggatgcgtctttggtcggagataccgttgccgatgttgttctggcgaacggaggtgatgtacgtcaatcaagaggagtgtctagctgatcgttgtcgtggttctgatgtgtttgaatattatctttcatcagattcgcagtgttccttcttatactttgtcgaagatgaatcctcctaaattcgaccgtgtggatgatatcgccgacctgaccttcttgaacgaagccggagttgtgcataatctgaggctacgatatgctgccgggatgatctacgtaagtcgaccattcttgaaccttaagttgcgacgtgatgctgacataccgaccggaaattatgcttagacgtattctgggtaagcatggtttgcggatgatgctcttgcggagattcctgtctaatatttcgatcaccatcaaacagactcttcttgatctcgatcaacccatacaaagacctcgggctatatacgcctcagattgtggctgcatatcgcaagaaacggagagatgaggctgcaccgcacatcttcgcgacggcagaacgggcatgggttcaaatgggggaagaaagagaatgtcagagtatcttgatcacgtcagtaaatgcgtttcgatcggacagggtgtggcggctgaccaaacacgatcacgatataacttagaggagagtcaggtgcaggaaagacggaaaatacgaaaaaagtcatccagtaccttgctgcgatcgccccgtcaactgaacgtggatcggccactccgagcgtgccgaactcgccgtcaggtccttctatcgcaccacgaatcggacttccgcactcgatgtccttcaaggggaaagatcagctggaggttttgaagcgccagcaggcaggcacgcttgaggatcagattttgcaagccaaccccatcctagaagcgtttggtaacgctcagacactcagaaacaacaattcgagtcgtttcgtgagtcgctcggatgtcctggtactcaactgctcgatttgctaatttccgttgtagggtaaattcatccggatcctgttcacctcggcaggggcgattagcggtgcaaacgtcgattggtacctgctcgagaagagccgtgtaaccttccgatcgacgggggagcgaaacttccatgttttttaccagttactaggttccggtagagctgagaaatcactgcgaggtgagggacatacgcatctgatctggacggttctactctgtgttgaccttcagtgatgagtagataagcttctcttgagtgacaaagccgaggactatgagtacctcaggaacagtcggaccacgatcgatggtgtagatgactcactggagtggagacatctcaaggtcagtccccatgatcagggctttacgatcagatagccctgcgcatgtaaggctgacctctccgtgttgctatagaccgctctggcaactgtcggcttctcgccagaggagcaattcgaggtcttccgtttcgttgctgctatcttgcacattggtaacatcgaaacgaagggcgatcgttctgatcaagcatatattgcttcgccagaaatcgtggagaaggtctgccatttattaggagtgtcgaattccgacttctctcgtgccgtcttgaaacccaaagtcaaagcgggacgcgagattgtcacccaggcccggacgaagcgtcaggccgatgaggagttgggtgcgctatgcaagcatatttacgagaaggctttcggaggccttgtagacaggatcaacagagctctcgatcgacctgctctgaaatcgtgagtacaaacaggtggcagctgactatagaacgatcgtcatctgatcaagttgccgcttgataggcttttcatcggtgtcttggatattgctggattcgagatcttcggtaattcgaagtcgcttgaatcagatagatgtcacgagctaaacccgcttgctgtcacagaggttaacggatacgagcagcttctgattaactatacaaacgaaagattggtcagtctcagtggacagaggaaggttgtcctgcttgctaaatcgatgatccatcggcctcttctttcatcgcgcagcaacaagtgagtgcaagatctccgagttccggcttcgtacaagaatgtattaattgactcttttgtccgggagtagtatttcaaccaccatatgttcatccttgagcaagaagagtatgggcgagagaacatcgagtggagctttgtcaacttcggcttggacctacaaccgacgatagaactcatcgagtcgacccaaccgatcggtattctgtctaccctggacgaagaatgtatcatgcccaaggccacggacaacactttcctcgagaagctcaagactgagtgggattcgtcaaatagaccttcgaatggggccaagcatccagggtcggcaaacttccagtctacgaggttcggtaacggattcattgttaagcactacgccggacccgtcgagtacagtacggaaggttggctagcgaagaacaaggatcccataaacgacgatgtggctggtctcctctctcgatcaacccaaccgacagtggctgccatgttcgccgaatatggcgaccaagcgaacgcctccgggtttgtcaatggcaaacgcgtaaaacgaggcgctttccgaacagcggcacagaaacatcgagaacagctgacttcgctggtcaatcagctcgggtcgacccagccgcatttcgttcgttgcatcgttccgaattcgagcaagaagccaagccaagtcgatgtacctctagtcttggatcagctacgttgcaatggtgtgctggaaggtatccgtattgcccgtcttggttaccccaatcggcttccttttgtcgagttccgacagcgttacgaggttttatgccctaacgttattcctaagggctatatggatggtcggaaggcctgcctgaagatcacggaagcgctcgatctcgcgcccgatgtgcacaagatgggtctgaccaagatcttcttcaaggcaggagtcttggccgatctagaagaacgaagagatggtcacctttacgacatcttcgctcgcttccagtctaccgcaaggcggtcgatcgcacgtcggaagctcaacaagttgctcaaccgcgcgatggcgatccggacaattcaaaggaatgctcgaacctacatcgaactgagagattggccatggtggcagctcttcaaccaggttaagcccctactcgcggcaacgcgggaggacgatcagctggcgaagaaaagaactgagttggctctggccaaagagcgagcagagcgggatgaagcggagaaagttagattggcggagctacagacccgtttgcaggtggagaagcaaaccatcgaagcgtctctcgctgcggaaaggcaaaccgctctcgaaaaggatggattgctgcagcgctcgaaacagactgaatcagaactacaggaggaagtccaggcgttgcagggcgacatcgatatgcttgaggagcatctggaagccgcagagacagctcgtctcgcagccgaggccaggtcctccgacatacgggccgaattcgaagcaaaaatgaagcagaacgaagactttcaggaacgggatttagcgaatcagcacaagctggcggaggcatctgaaagattgcttgctgtcaagcaggcccttgcacaagtcgagcgggagaaggccgagctgcaagcaaaattgacggagtctagcaaattagctgaacgcaccaaggatgaccttgtacggatcaagggaagactgcgggagatcgagagtgaagcagaggtcaaggtcaagacagaaaagaacaaagtgtaagtctaaactggggggaaaggggccgcgatacgatatttgatcacaacgacacaggtccgacttgatgactcggatggaagctattatgcgagaaatgaagtcgaaagaggagcgcctgacgacgatcacggttgcgtctgctgaatatgaaaccatgatcaagcgcaaggatgccgatctcacggatctcagggccgaagtgaaatctactcgcactcagttggacgacctgaagcggaagttcagagaggcagacatgatagccgagaccgccaagaaggatcttcaatcgtccgaccagcgcaatgggaagcttagcggcaacttgaccaggctgcagcaagaactcgatggtctcagaaagctgatgtcagccaagcagagcgaggacgcccaaaggaaagaggttgagcagagtcaggaaaaggaattgctcgatttgcgtggacaactagacaaggttagccaacaagagcgtgctgtacgtgaagctacaaacaaggctaccgaagagtacaagaaagacctgaaaaacgcgcaggatcaagtcgcaaagcaaattaaattggttaccgaccttacgaaccaattaacggaagcacgcgaccaactcgctaagcatacgtcattgttgagtacaaccgctaaagtcaccagaggtctggaagtggacctggcggaatgtcgcaagcggctcatcgcacgagatggagaatacgacttcatcagcaaggccaagaacgtgagtcagactagcatacacgcacagccgttccaggctaacgaggatgaccttggatagggccttgaaaggcaattggacgtggccaagagcaagctgaccgatcacgaggaagcaattcttgttatggaacgcgagaaagtggactgggctggacgattagacagcgtcaaccgtgatctccgcgctgagcgtaacagatccgaagcggccgaaagtgagcttcggaacctactcgcagaaaccaaagcaatgcgacagcaagccgaacacgcaaaggccgtagccaagctacaagacgacgaaatcgcattgttgcgctcgcgcgagaacaaaacgatagtcgaacatgttcacgttcttgagaaggccaagaaagttacggatcgcgagctggccgcaacgaaagctgagagggatcagctatcgtctgtcttacgatctatggaacagcaaaagattcgcctcattggcgacattgaggacatggctcgccagaacgaattgctgcgctctgacattcgctcggcgcagaaaaatgctggtccttccccagaagacttgaatcgggaaaaggaagcgcgtcagaaggctgaagctcgtgtcgctcaagcggttcctcagacggaagaattgaacaagctgaaagctcaggtcgtgaagcagcaagatacgattgtcaagctagagaaggagattgaacgatccaccagcaggtctcttccgcaaggcaacgaaattgtgcgcttacaagcacaaacagccacttaccaagatcaagtcacgaaattacagaaagatttgacttcggccaaggaagagctagatcgtgcgaacgccttggctctcaaaaacacccaaccgtcccatcgaacaatgtccggaccaagcccgtcaatcaaagccttacaggagctacacctcggcaacgaacagctttcgaaatcgatggcagaagaactgcgccgcaatcgactcggtcccttggctgaagccagcgggcgcgttcgcaacgagaacaatagacactctctggacatcggctcgatgcgaacgatgatgacaactcttccagacgacactggaaacctggctgccgctcagcaaaagatggctcgggacttacagcagcgtaagctaatgaatcgacaccgtgtgggtttgaaaatgatgttaacttttagcgcacaacagtacaagccgacctgcaaaacgcacagatggtcgcgaaggaagctcaaaaggctcgaaccgatgctgatgcgagacgggctgcggttgagaaacgtctcaaggacttacaagacaatgtgagcttcaggagactgtcgatcacacgacacaaagtctgactgacctcgatgagaagacggatgactctgcgtttgacaatgctgccggattcgcagctcgcctcaacaaggagatggagaaagaaagagcgcgataccagaaagatttacaggacttcgagcgaaccgtacaccagacccgtaccaagtatcaaggtaagcccgcgtcaggtatttagatgtgaacggcatgcgatactgacaaaatttgctcttcttcacagccgagcttgcacagctgacagaggatctgggatctcagcgcgacgacatgcttcggtacaaggaagccaacaggctcctcaaagctaaagaggaagaactccgccgcgagttggaagacgagctgcacagttcttccggctggaagcgcgagaaagagagattagaaagcagaatcggcaagtgttatctatcctcgagagaagcggccccatctcaaccttcttacgatctaaacagtggacctcaacactgcactggaagccgcttcttcgaaccatgaagtcaaccagggacagcacgtcaagcatgttgcacaaatgaaggagctacgtcgtaagctagacgaaagcgagacgtaagcaggcgaggctgggtagttggctcgatcattctatactgacaaggcgtcttacagagaatgctccatactccgacaagccaagcagaagctcgaagagcgtgccaacgctcttttcgacaaggagctcaagaccagccgtctcgaccagaaccgagcggtgcaacagctctcacttgaaaagcaagaggtccaggctgctctcgacagcgccaacgacaagatcaacttggtcaagcagaagcaagcacgatcggaggcgtacgccgccgaatgcctgcaagagcttggcaaggtcagaaaggtcaataccgatgtcgatcgacggaatgtgagtccgccgtggctctcttcatagcacagtattccgaaagaggctgaaagaggcattcgtctttacagaccgccttggagaaggaggtcaaggctctccaagtcaaaattgtcgatctcgaaacgcagtcttacgccaactcgccggtccccggagctaccaagcggctcgagagcaagcttcgcgaggtccagatgaagctggatgccgagattgaagaccgaaatgaagctctccgtcagaaaacgatttgggagcgacagagccgggactaccagtctcaagtgaaggagatgattcaacaacaagagcggctactccaggaacgcggcgcttatgaacgggctatcggggagctgcagacgtctctgaagaaagctgtaagtctctcgcagccgatcgacggacgatgggcttcgaattgacgctttatcgcgaatccagattgatgcacgctagccaaggatcacggactttcaggaccccctgtatcgatatttctcgacttgtccctctgcggaaatgacacctttgtacgacccctttcatgccacgacccaggtcggtctcctttatttgccgctacgttctaggtccatctgtaaatcatgccgaatgctcgtttacctatcgaatcataccctcggtgtgaactgaggctgcagccccgacatttttgctcatgaggctagcgtcggcttgctggtgatgatgcttttcgatagaacaggatcacttcgtgtggttttcttatcgtacaacccccctcgaaccgtcctcgaatcgccggagagcgaccagtgctcatccatctccctcgatatcctgggaatagtgtcccggtcgatcgatgtgcgatgtaattgacgcccgatctgcggatcgacgtcggtccaatccaagagaagcgaaatccgccttcccgtgctacgcctctactgctcttccctcccgtagtgtcatccgcatctatgctttcctccctccctgacgtgtccttgctagaactcccgtttactcgtcttcctcgccggtcttgacgtacttgtcacggatgtcctacgaggtgcgaacaggcaagcgtgagatgtagaggaagaagagacggtcagctgggcaggccgggggtgcacaggacgagaaaggtcaagagcgtaccttccagagcttgcctcggttgtgcctctcccctgaacatcataggcagacggtcctcgatcagtgtcccgaacaaccgagtaccaggtcagggtctcaaaaagaaggccgacttacagaaagcggtggtggccaagtcgaacgtgatggaaaaggcaaaggctcccaagaagatggacgagacaaagaccgagtttcgcttgacgaaggtgttgtagaagagctatttcgagtgtagaagcgacgatcacagtgcgtgggcagtatatccggaggtagagatggtggggatgagttgttcaaggtgttgaagaccgtagcggatgaggttgagcgaaagaaaaaacaagcggaacaggcgtgatcagccaggtcggctccgagccttgcctaaatgatacgccactcaccgaaggcattttgggtgaaactctcaaagatagtcttgacagaaacgtgaggattagatcgagtgaatgcagggacgagacggacagggtgtgaacgttctagtatcgaatgtagacctaggttcatgactgtcaatgtctttgtggttgatctctcgaggctccgattggtttcccagcgaaaggaagagcgagaaatcccgaaaacaaaggcgatccgcggtgcaaaacagtgaccgaagggtaatttgattccgagcggatgtaaactagctaccgaaccctcgcgcaccgaacgacgaacgacgaaccgcgaccaccaacatcatcatcatctcgacgctcgacgacaacgaatggattgatcacggatcacggaaagacaatcaaacacatcagctttgacagcaataatagttttggagagactaccgacgttatgaacatagaaaatgacgctatatatgcccaagaaaggcagtgttacactgctgcaacatgacctacatcccgcaaagctctcggacgtcgccatgattagatcagagtctataggaacagtcactgatgtagatggtggctctgtgagtacccctggcatgctgcttttacactctgtcactgagctatagttatagcacgtctccgtcaaattagacatcaggtcgcgcttccctgatcccaaggtcctctcgccatggaaggcaccttcccgcaaagaagctagccggatccgcacaaatcctccttctctcaaagattgtgtggacctcttggtggaattgattatcgatggcactactgtctccagcagggcatttcaatgcgcatcagggaacatgtatgtctttacatggcatacctcaagaggacagcaaggagaggttcaacttccgtgatcacggggagatcaagctcgagttgtttcgtgtatgcctctctcagtgctacaggacgggggatcaccacgaacactccttcctggctcaatacgatgaggatgaaacgcctttttataccttcacattcacctatgagtccaaggaacataggcaagatagggaaaggtcgaggcgtcgtgctcgactcgagaacgaacggcgactggagaccgaacgactcgagaaccagcgactcgaacgccaacagcaactcgagaacgaaatgatcgagaacgaacagcgacttgagaacgaacgactcgagaaccagcgactcgagaacgaacggcgtgagaatgaacggcgaatcgaacgcgaacgactcgaacggctcgaacgcgaacgtctcgaacggctcgaacgcgaacggctcgaaaacgatcaaggactcgaggaagaacggcgacttgagaccgaacgactcgagaacgaacggaagcggtcgcccagtgcagaactcgacagggatatacaatcccacagattggaattaaaacgactagagaaaagaaaactagaacatcagctagctaaggagacacaaccacgagaagaggctgatcgcaaaatagcagagctgcatgcgaaactccactcgtcaggttctgtacgtgcgggttcggtagccctctcagaggtggacgagctcgagggttcctctccagtcaaacggcagaggatagatgatgcgtatatcgatttgacgctggacgacgattccgactggtagaaaaggaacggctgttccccgactttaacgactttaacgactttaacggcgtgacatgaacaattttcggtttccaatgtaatttattttcagatgttcgtgcttctagaaccaggcgaagctgattgtaatacaagccccgtcgctagtccgacccgtgatccatcttatgcgttccctctcttccgtcgggcatgctcgtctagtggtgggcgtcggccttgggcaagtccttctccaagaaagcgaggtactccttggctccggcgttaccctcaccggcatcggcagagacgtcctgggtggcagcgggggccgaggcaagagcgggctcggtagcgtcaaacttggagagctcggcggagaggtcggaaggaagcgagggagcttggggggaggcaggggcggtgtacgacttgacgactccgacgtgagcgtccttggcctgcgaaacagcacgacaagcgttagtacacctccagtgaacgaggtcatccagtagtagaaaaggtcggcgtgcgtacctggggaacaggcttgtagctcctaagctggttcaagtacaggtcctggaccaagtctactcggatcgtatcgcgataggtagtgcccataatccagcgcaaatgcgattttcggaacagataggtcggggagagaaatgtcggagccgggcaatcgatagtgtcaggggggagacaggcgtaaacaagggtgtataattcgtcagctttcacaatcgagcccaatttccccaatggcgtccgagcactcaccctttcgggcaacggtggtcgagaaagacctggcagaaacgccgacggacgagacccggagagcctgaattgggaaaagaaattccaaagaaagatccgatatcgcggtcaacaacttgtcccccatcgtccgcgtgtcctatgtttccgtgcgggctggcttacagcagttcggaggatagcaaccattttgaagagactagtaagaatgcttgtaaatatcaccgatcgatcgccggtctggtttccttgatgatatcaacgaccctgatgatatcgtcgcaacgagcagacgagaggcaggcaagagggacagcggggccaggatccgcgacgggtcgatgctttgctttctcacgagacgcgcgaaaaacacggaatcaccttaaaactgaagttgtcagacatgacacgggggacaagttcgtgcgaatcaatcatatcagaagaagagtcaggcaagggacccgtgtagcctacggtccgctcggtgagaatggcaatgcgtgtcattccatgtctagctacaggtatataagcaatcatgcgtctcccttgtcaaacctgatggccgctgcggtcctgacttgcgcgacgtcgaccttgtgtccgaccaaagtcctgatatcgttgattccgtacctgtccccaaggtatcaagtatcagctcgtaaattcaacctccggtatgatgacttgtccttacttgatcatggtcggtcgctcgagggacattccccaaccgaggactcgcactccctttggcagacccatgggctccaacatctctggacggaagattcccgactgtgacgattgcccggacagtcagtaccgcgctacacgactatcacgggagggtgacaaagacccacgtttccgacctcgatccatcgcttcagaccctcgtggtacgagaagatctccatactaggctctgtgtaagggttgtaggcgggcttgaacctcaatttgttgttgccagtcttcttgaagaaagtctccatcatcgctgtggcggagcaacgtgatcatcagtaacgtcgcttgaaaggttcgttcacgatgcgcaaattcaccaatcaagtgaccaaggttgatgtcgtagtcggccactacaccctctacctggtggaactccgccaaatgggtagcatcggtagcctcgtttctatagagtttcgcacgtcgttagtgtcacaccaccgtggccgcgtaactacggatgctcaaactcaccggaagactcgatcgatactgaacagcttgcacggctggaatccgccctcctggttggcgatccggtaaagcatgtcggttgagacggcggtggtgtgagtccggagcaagagtttcttgctctcctcgtccgagaagggagctcggtaaccgatggagccgtatccaccagtctcgtgcaccttcctgacccgctctaggtagtccgcaggggggtcaccagcctgtatcgggtctagattcgattacgatgagggaagggaaccgcatgggtgagcacaacgaccatcaacaaccaacgtgagtagaaagccgaacacacccttgacatagaaggtgtcttgcatttctcgagcaggatgctgctgggggacgaacatggcgtcgaagttccagaaagcggactcgacgaacctgttcgtaggcatttcggtgaaactggcatgacacggaagatctgtcagctcgagcggttggaagcagactgggcgtcgtgactcaccccatgtcgaagaagatctgcctgaactcttccctgaccttcagcaagggatgcagagcacctccatcagtagggtcaccgagagaggcaaggttgtactttttaaattgagcttgtttccaagcgccgctgcgaccgggaacacagcgcatggttcaataaaggagacctctgagcgatcatcgaagcgactcacgatgtcagcatctcggtggtcaagtcggtctcgagcttctgcacggtcgtggcgaagttggaacctcgggagatgtcgtacctcgtgtgtttcctgttgtgtgcaacgaaatcagcccgtctgcacggaaatgtgggtcagacgcacggtgagaaaaagcttgactcaccgtgcggagatcaactttcgcttcctgagctcggccaacagcttctctccctcgggatgggtttccgtttgacgaatgatttcgagttgtgatcgcgcgatgtcgtcgatggactcaacctgcaagcccatacaggaaccccagcgttgtcgagcgttcataagctccagcacatttgcaaagacacgcgcaaggggaacgtacagcctttacgaaaccggctccttccttggcgatccacttgttcttgaaggctttcccctgaccgatcttggtggtgtcgggtccgagagctttctgcgcgcggcacaacccaacttcctgagctccctggagcagcggtatgtcaaactagaaccggacctacctgcagatccggcacagtcataggttcaccctgacccttggctggaagcgcagcccatactctcgcctcgtgtgatccgttagtggcaatctcgattccttctgctgtcaagacgctggtgctggtgttgatgatttggaattgaaccatctgcgcaggatccaggtttccttgttagctcatgctgggcccgcggatttgcatgggcgagcgggagaggacatacatctcggctcaacagactgtccagtacccccttcagcaacacctggctatctccctcattgaacttgacttcggatccatcttcgagcttgagggtgagatcccgcgagtcgagtgtcgagctggatggtagcgagtcgagcgtgttgagaagtagcgactggacttgctcggatgtggcagcgacaggcattttgatggtgtgagaccttgatctagttaatagaaacgtacactgtgctggtgtttggcttcgattcggagccatcaaatgatcagagtacagtacatgggtagacacactttcgagtcaacatctcgttcgaacaagaacgcataactttggataaattcattttatgcgcttttgtgtttcagacttctgtcgcatccatcatcaccatcatcatcctcgttattaatccgcattgacattggaatgcatcgaggcattttcagtccttcagtttgtttacacatggacaagaggagctggcagccttgatgatgatacgaagctggcgagtagatcccgtgtacctcgttatcgtcgaggccatgacagagcgttaggcacgatctcaacgcgaatgatgtcccgtgatggctcagatttcacgtgattaccataacctgagacacagttggtcggtctctagcattggacatcaacttgaccgagaccgagtagatgtaacccataactttgagagcatttccagcttgctcaaagcatcttcgaccgtctccgagcttctgcatcgatctagcatcatcgtcaccgtcatgtccttcatcaagcagcttcccaaatcgctcaaggagcttcgagtgcatatgtgccaaacctcgcccagctcgcagggtctacggtaagccgatacaattccagtgtacggggcttcgatcatgcgtcctgacgtccggtactttctctactgctttatgtctgccgataccgctatcacaaaatcgttatccatggcattttgacaactatacaatcgcgacgttcttaccgacgctggcacagacaattcgtcttgagcaactaccccgccatcaagtcctccaaccctgacctcaaggtgctcatccgggaagcacgaggagtcgagccccgagtctttgctcgtttcggtacatatcggttgtcaacctgtaaatacttcctcgcccgtgacagctgataattcgacttgtgctgctcaactttcagaacacggacgggagaaccagacttcgctggccgacatgtccgagagcgaggtatccgagaggctgtccaacctcgtcaagtcgtgattgcgacagcaaaaatgaggagggacgacgacaactatgacgaagagcttatcggactggctagaacgggggtagactggtcagcagatcgaacggtctcagtatggcgacgccgacaagccagtaatgcagggcttcaagatgtacaagacgagacgaagccattgtacttgttgggaatacacaaatttcgaaaatcactggggcaggaggcgacctagcagcaggacttggcgaacatcgcaaagaaaacgcacaaggatgcatcggagcatgatctttggcgacgatacaacctacgtctagcttcgcttgcgctgcatctctgtaacagtctcatcgggcattcaccaactctccttccccttcccgacgcttcgaaccgagcccgacgacccttttggctttgtaggtcgtctggtggaccatcttctgcaatttgagctttctttccgctcgagcgttttcccgccacgcgtcgtaacgtttgatactgtcgggctgattgaatgggtcgtaagcccacgtctctttgaagcgctgaaatctggtcccagaagcgatcgtgtccttgttgatggagctgttagagctagaggtaccgtggacgggggtggagaggttaagttgagagtcggagttgttggtgctatcgttaccccttacagtcgtttgggcgggaggcatcgttgaggagttttgaagattcgagtttaggggcgcaaagggaaggggtcaatctcgtgaatgttgagcagatgattgtgatacttgaaaggcgttactttgacctgatagcgaaatatatatggctacaacacaagcagatccggatgactcaatcgaactggtatgaaaggaggtcttcagggagcttcggatccgtgtttcagcggaaaaaggttcgacttctcatccacggtgtgcagggtaagcagccttgcaaacacggggcgtctgaaagctgcatgggccgtgccgtacgcactctgttgctatgcacttagtttccgctttccggatgaaagattgattgaacagttgtcagaacacaattgtcgcgaattgattctgaacaccgcatgagtatattattacaatgtagcttttgagctgtttgtggtatctttacgtgcaatcaccctatagacctcgtcctctaggtcgcattgagtattcctgatgtggctcaaggtcagcaacgattacataattgactcgttcgggagggtgctcaccatcgatcaatgagttccagtaactgtcgtcgtgttcgaaaccattcgtcagacccaaaagatcgtcgcccattcccacatcgaatcccgccgtctgatctccagtcacgtcaggctcgtatctatagaatccagccatccgatcggaaatcccgtggaaagtgtccctctgaggttcttggaaagccatgacctgatccgctgtgatagggtcacggatggacgccattctcgtcgtaccgttggggctcaaaatgccttcccagccctctgggtccatactgggaccaagagtcgaatccgcggtcatgccagtatttccgttacgatcgttaaactcaggcgcttttgataacataggcattgggaccattccgaagtctagatcagtcgtattgatatttcccagggcgagtgacgaatttgctgaaagccatttgtcgagcagtctttgtgggtgttcgtcttcgtgacttccgatagacgccggcgatttgtgatcctgactcgtcacggccgaagccgtactcaagctcaatctgtgttgatgactggaagtcaggctgagtggctggaagggggctgtggtggcgaccttggatagagcgttcggtctgacagtgccgtgccccggttgcaccccaccgctcatgaaggcgggatacaggtgattgtggctgtggaagacggcttgtggaacagtcgcttgaggtataatcggtttgacgtcggggacaaggctagtatcaggtccgcttccagaagtatgtcgcgatgcctctccttctcgcaagcccagcaaaagcgcagcatcactggtattgacggtcgatgggtcgagaacctggcaggctcgtcggtacaaagtttgaatctgtcatgattggagggaaagcgaagcgtctcaaggtttcagtatgggcagtatcgacacttggaaatagccagactgacgatagcaatctctcgtcgagaagtcaggtcgtccactttgtccagagggcgttgctccaagaatgttgccagactggaacgcatctcttctgcatcttcacctcgctgcaaacgcatttgaatctgtgtcagctactcaagcaatgaaatcgagcgcaacctgagcttaccggaagaataatcgcgtagataccctgatccggttaaatgggttttagttactgtgttctacgagacgaacgactaccgcttacagctatcatggcggcattctgggagacgacgtaattcagcgcttgatgagcaaaatcgaaagaaggctgcactgacgaattccctgtactgtccaccaacgtaggcgttctgcactccaggatgatcggcacgaaagactcgtctctgaaaaggtcaatgaaagataagtcggcgtgttcctggggcactccggtgtgatgaaagacttacaatgcggaagtccatcttcgcggcatcgaaacaagctcttctagaaagagcgaacttgttgctcttcaactttctcaacagccaaggtcggtgcaaggtgatcatgatgaagactggaagatcgaggttgtcaatatctggacgctggtaggcgagccaatcgtgtggacacgggacatacagatctcggtcgccaggtagaatcggtgaatgggaatgtagctgtactgcggatccctatcgagacttttgtcgggattgtcgtagcggaagtgctaaaggagcaagtcatgttagattgtggagacgctggcttcagtagattcgaacatacaggtggcaagtcttcgacaaattggcgcaactgcttgtccaatgcttctacttcttcaaaccgtgcaggctcgtgcaatttgttaaacaagtaggtgatctccgccacgatcttggcgaatcgttgtcgtaagatgatgaatgtagatgaagtcggttcgtggaagggtttggccacgagtgtctgtcctgcgactacctttgagaactcgaggttcataggttctttcgtgtcgcagtacgcatcgatgatggaaggtggtcgacctagaattagagaatagctacgatttgaaaacagtcgtttagtcgcgttgctaaactggagctgacaaggccgatacctactttctgtcggcatggtataggaacgaccaaacccgtcgccggtattccgtctggaccggactgtttcggaaacggtcttgactcagctttaatacgcggccataccaggtcaatttctgttacgtactccaggccaaacttggttccgtcacgatgaagaccgatagcttgtgctgttcgtaaactcgcaccgagctgactccaacattcggtaagacctagtggcatgggataaaaggttagaaggtaaactagaactggtgagcggtcgaagcgactaacgtctgtcatggatcaggaccaagtacaatgcgctctgtgacaggcgacgtttagctcggatggggcgatgaccgtgggatggactgtcaggctcaccaacagccgggtaacgaccaactccaggctttccggttggatggcagtggcgatgagaatcgagcgacgagctagaaacctcaacgtcaggcaggggtcattgtgctttccatccatccttgtactcacaacaccaatacatcttgagactgatcatcttgcgctcctgatcggttccggcccattcctcgggcgccaatcgaacgctagttgccaacacgatgaatatcaagggcagactcctaacgttgtgtggctcgggtccgacctcgcctttcttcctgtacatgtcctcgaatgcggcccggaagccagcttcgtggatggggtaccgaacatagttgatatgcttgaaaaaccagtcgactagttgactggccaaggcgtattgaggcagctcgttgacgagttcgagtagcttgcgaggcgagactccgcaatcttcgataagctgtttcatgttctcggatggttgtccacagtcgtccagattgagctcgatcttggcatctcctcgcaacgtttcgacacctgggacggtcccatctgtggcgaaccatttggccgcatcaacagccgtctctccagcagaagcgctgcgactcatgttgtcgaacggatgacggccatctcggctgctgctccgatgaccgactgatggcccgctcgacgactggcgggtgatgttgatggactctggaatcccgtaatgtggtggggcagtatcttgtgcgtggataattccgttcatgctggctagttcaaattcaacaagacgtggtggtgagcatgactttcagctctctgcttcacagcgatggctcacctcgacgttgtagctcttcgttgcccaagatactggctacgctgaacggactgggcgcgaccgagcccctcgacggactgagcgcgtcgtgattgctgctgtggtctgcgaacgggctcaaatgcgagcttcccggtgtaaaggtcggtacttgtatgctgctccgacgtcgttgctcgtcaccttctatattggacgtagctgggctcgagacttcttgctgcatacccgtcgtcttggtgccgggacccgtgctggatccggcaccaggagtggaaggctccgtcttgatctcggtcgactttttgggtttacgtccagcacgagacgcagcaggaccccgggtgctgtctggtagaggctgcccaggaatgtaaggggtctatctcgatgatcacgagatggtcagcgcgggaatatgattttgaaaggcgagagcacttacacattgttcggggatctattaatcggtacgcaagggagcagtcatggtatcagtatggcttcggccggcgttggcagatgcagagctgctatctcacctttcgagctgttgagacaaagcgtacagttttccgtcagtgccgtctgccgaagccgcgatgactcgtcatttgctcacaagtacagtgttgacaagggatctgcctgttacacttctgttttcgcttcgtgcactgggcgcaactcaaagcgatcctaggcttcttcctcttcggagcttgaaccgcctggtgggcggtactctgtccggcgggtaattcgaggttggacttgcccagcatcgtattcgtacccggtcgaacgggttgtagctctctcaacttccccttcgactcgtctcccgacttgcgcttgaccccagcgacgacgcccgaaacggcgttcgggttcatctcgtcctcgtcgtgatcgaattcggcgtcacgcgaggcggtacgtgttcggcttcctccgctcgaggacgtctttcgccaacagtcttgtccgctgagtcccagaggatcgcagatgcagccagcagcgtcttctgtttcttcctctttcggactgaatccgagtccgagtccgatcagggaacctcctctgaccacgatctttcctcgtctagtctcgagtcgtttgagagactcgggtgactcggtctttacgcgataaggcggacctgtcaataacggtggcggggaaggcgatcgctcccaattctggaggagctcctggataggtcgaggtttccgttcgacgagtggcgagggctctctatctgaatcttcagcttgatcttgctgttgatcgtggtcgagcttgatatcttgtccgtcgtctctagctgctgtgatctcgttgtcgagatgacctcctttgacggcgttgaccggattgaaatttgattccgacgatgttcgtgccttgacgctcgcgtcctcggcaacaacgactgatggaagggaaaggtcctttggatcgttgtcgtcgttgtcggcgtcgtcctcgttcgagttttgcttttcggctttggcttcctttgcgacgacgatcaaggattcaacgagatccttcgaatagggaccaggtaacgaccgttgcttgtacttgttgtacttgcgcggaagcggtacggccttgggattctcgctcgtagtcgaggttgtcggtacgatggaaggatcgggtgggatgtaggacgggccaagttcgtcgattcggttcgaacgtggtggtccggcggcgaatctcgatgagaacgtggtatgtggactttgttgctgctggaccgatctccttggcaaggcgtgcgggaaatcgaacgggttgtgatccgtctgcgtgctcaaagccggcgagaagagggcaggagcggggtttgggttcaagttgctatgcgtatgaggtcgcgaactatggaacggattgacaggggaatgtccggctgatacctctccgttcagcagatatggtgcgaactggaacgcaggcggagaatgaggcgatgtggcgaagtgggagtatcgtcgattggcttgctggtaatgcgagtcggacacggggagctgactcggttgaaagcctagagaccgtcgctgctgctggtgatggtgttggttcagatgcgactgatgttgctgatgcaaaagccccagatctgatggagaataaccgtgtgggaaaaagacgggcaagccggatgttccaggtgtcgtgacgaccggagagaacgggttggagagggtgtcgaagggcgagttgatcgatggaggcggtgcaggtgggaagggattcacatcgatgtacgggggcatcggaagatcgagaggtaggacgtttgtaggtaaaccaccgacgtcgaattgttgggtcggaggttgcagtggtggtggtacaggttgagtatcaatcgtaccgaaagtataagggagtgaaccaaagttgtttgcaggtccaatttgagtcgaggatggtcccgatgaggatgtaccgatgtaagatggttgacagggagattgtaatgatgggaatagtgaagggtcgttgatgatattgttattcagcagcccgagattgtcgagtgcgaccgggtcgttaaataaggcgttccattcggccgcgtatgcattggatccatcgttgttgatggcgttgttgccgttgtcgtggttgtcgaaacccagggcaaagtccatgggttcgccaggcatggtcagagggaaggcggagggtaccatcatgtgatcggtcatgatcgtatcgccgagtccgaatccaatggcggaagcgacagcggccatattcacatgatgattgagatcggcggtcgtcgaaacgcgaccatcgaggaagtccgtgcacccgtcgatcgatggatcgccaataataatgtcattgtcgaggttgtcatcgtggcggtcggcatcgttcagttgttcggtcagggcggcggaccccaggatcgcgaggatcgcatcatccgagagttgattgagatcgaacgacgttttggtcgataggcgagttcgtgcgcccgcacggatcgaaaaaaacgaagtttatggttgagaagagagagaagaggaaagattagaggttggatcagcgagtgaccttggggtggatcgaggtcggagtcaaagtttgcgcgttcgtcgcagtcaagtcaatgtcgatgtcggacgcgttgagagaatccaatgggtatagctctgggtgtcttgtcagaggtaggaactctcgatgcaaggacatccgtgattgtatagaggggatgaaagacgaaataccgaacaattcgagagcgacaatgagatcgggatcgaggtcgacgtacgatgacaagtttcagaggcttccgaaggtcccgagtatgagccaggggtggggaataatcttatctgatagagagcgcgcgacgaaagggggacgtgttgcgctttttccaatccagaacttgaagcacaaacaaacagtggacggccccgtcagccttgccgtcatcgatcgagtcagtgaccttaaaatgagtccaaaagcaatctcacgcgttttagtctagatgccgatgtcggtgagttggcggcggcggggaatagccgggaacaggagctctgccaaggtttggccagttgcgaacgacccgaactgtcgaatccaggttgacccgacccgaaggaatcgtccgcgttgtgcggtatatatacaaacccgaaaaaagacgaggtcgtgccacgcgtgactcaaatttagccgccgcggacaaaagggaccgtcatgcgcctctacttggtcctagaagcgcagcgccagcccgccgaatggcttgtcttgtccatagactgagccgtttcacatgttgtacgtcgagcagggttctgttactgcaacaccgattcccaataccaagctgttatactgtcatagcttaccatacagacgtacaagattttgacaaacagctccccttttatgtgcgtttgaagggtaccggtatggtcacaatacgcgtcttcaccttcaaaaccggtaggcttgaaccgattattttgaccctgttccctgatagccgtgtccctgataaccgtgtccctgagacaggaacgaaacccggggcaagattcacggaatctctactgcctgcctccttcttctctccacccttaaactcaatgggacgaggcttcactctcgctctcgatcccgctgttccctttcgtacttctccatccatcccggttggagggcgttttcgatgttgcggcctttctcctcctggcgactgtttaccggatttacttagcaaaggggcagaaagatctcctatcccagagtctggcatacccatctgcgtgcctccctgtgtcatcctgctgaaattggtccggccgggctgcgtgctgcgatcagtcgtcctttgcgccttgaggcctatcaatggtccaggtcttttgagccgaatctttagactaggagactttcgagcttcaccttccgctcgatccttcttggtcgtttcgagaaaatctgaaggttgaaaagggagcattatgaccgattcgtcgctgctgtcacccagttcgtcgagaggtgtttcgccttgcacgggttgacacctcttgtcctcttgctcagctccgggaccagcaggcggtctcccattcttggaaggctcaagtacttcggcccggtggaggaagcttggactcctttccctatcatgctggactttgcgcttcttcgaaaccgagtcagactgatccggtagatctcgttgtgaaccgcgagcgcgtttagcccaggtcgccactgggtcgttgccagaccgatagccttcattggacttagagcgcggcctctccgtcggcgttttattctgaatagtgtcgctcgatttggagccatccgacgatttagcgatagatggtggcgattgggtatgtggggtatcatcgcagtgaagttgatgtccactttctgtcgagcttttcccgatcacctttccggtgcggacgcgatcttgagtagtaaatggcggctgggaatccacctccatcgtggacgccgtcaaggtagggtctggctggactagcgacagcgtgccgtcattttcccctggaggatcagcttcgtcggcagaaggcgatatcatcctgtccctccgccagctcccttcgtgctctttgttttccttgtcggtgggggtctcacaaaagcgaagacagctcacatccactactttagtgggctcgggggagccgctcgtcgattcgtccgctgataaagacgtcaaaggtgaagactgcttcgatgcagcaggtgaagtgcccaattgttccaagtgtgccatcgggctgaggtcggccgcagccagcagtgacttttgtgcttccgtctccagttgggatcgtgcttctggttggctcaagctaggttgagtcgccccgcttgcattcacgacctcggcgggatgattccattggcgaacgcgggccgcggattcttgatcaccagctgacgacgctactggtgctaaagatgaacgggtaacactgttgccagatctgaaagtctcgcctagctgctgactgggatagacgaatggatgatcctggacaccaatctgttcagccatctcggtatgaaatattgctggactgcggggtggaacaagatcctggtacttgtgtgtgcgggagctttggcctgtcatatgattttgcgtgtgtatttcgacagatcgagcggattctttttgaggagaatgctccgaccgggaattcatcaaaaagcctatcgcatgtcttccagtccgggaatcggagttccagaactgagcctgtctcagctcgtcgatttctctctgatcgtccccgagcattgccccgcggtgtctgttcctgggtcggtttgcggcttctcttgaggctttgtccatgtcccaaggcttgtgacttctcgtcgttgatgaggaagcttgagaagacggcatggagtcacccagccagtcgtttcgttgtttctgagaacccggttgcgatccgctggggcaggttgaagcgggggtcatcggtaaactcattagtcgacctggctgcgcgaaggaaggtggaggcgagtgaagagcaggtgaggctggaacatggttccacaggcgggtcagaacctcatccatagtgagggttgatcctctggaatatgtaccgtatggatctcccacagagaaccgcccaggcgtgacaggcaccggcattcgcttcgccaagattggatgattcgccggattgtcacctgatcgttgggaatggtcattggcgagattcctacgtggcagacgcgatgttctgtctgcttactgttatcctgtactgaattgtcaaaccctagagcgggatgctgtggactcaaagaacagaaaaatgaaaaccgctggtagtgccacttgtcatcctcaggcctaacatcgacgtccaggtcttccacatcataacttcccgacaaggttgagacatggaaagctcagtcctagttcccccgaaactcgattccagcagcacggcttacctagcgcaagccggggatcttgcggggagtacgatgagattccgggtttcctcgcatctcgcccgcttcagcaggatcttgatcgtctccggcttgcaaaccgtgtctaatccccgaaccgcagatcgtgctctctgcgccaagtgcatgtcaataccggctgaacccgaaatgaatgtaaatacgagctactaacttgcactccaaatcggaagggcttgaagtcgttctcctcaagcgtttccccatcgaacgtgatgtgcgtcaagccctcttttccgttcgtaaacagggtagttatcaagcgtttgtcgaagtaaagattagcctggatctcatcgtaatggtgatgggggtcatgatggtcatgctgaggtcggctgtggtagataaagtagtcgctacaatccactacgatgctgaatttctgcctcacatcaggttgacttagctcgccatagctcggattaggtctacattttagcacataccgtatatccttcaacgagcagtctacctctggtttgtcttctgttgcccggtccacctggaccccctaggatctccacaccatccaagggtaggatgccgtcatcacaagaaatccggcagttgaccaaagtagtataggcaactagctcagtgcagaggaccatttgatccatgatgtgattttaatcgcctgtgtaacgccgataaggatgtggacgtcagtcatggacgtgagtttatcatttggcagatgaacctactactcaacccccctatgtcgactctccgtacactactgttatatagtccagtccctgctggaaaggaaacatcaataatgatcgcttaaaacgagagcggaagcaaagctcctgcggaacagaatgtgaaactcggattttcgatcgatcaccctcctttgaagcgattgtcccggaagattgggccgcgatcggatcatcgtcgacccaatctccgatcagcgtcaattgggtgactgtatcctgaacctgattttggacatgggatctcgcggacgatcacggccgacagtgcctagagctcatccccggcgtttcgccaaggaggcgaagcagtgactccgcaggaaacgtgatcacacgagcccgacgcggcccttgtgatcctgttcaagacgacaatagtactgtgatggcagcctcaattctactttggacgccatagcaatgtcgacgagcccacgaatgccgcacgacattatggatgtcgatcgggtcgatataatacagaaatcaccggtcctgaaccgatattacatgggagaagaagaggcacggcgtgctgccgcacatgagaaacccctcgtctacagcctacacttcagctgcgagacgatgcgtttgcgttccagtacacgtctagtcgaggtctccagtgaaaaagtagtctcccgatgacttttgcgtcttgtccaacaaactgttcaacttgttgatacgcggtcggctgcaagagaggcggtgggcgagacagttagtcgccactctatcgagctgataacaaacagattcgtggctcacaagttggtagggtctcgtcggaaggtgatctcgagcgacgccaagaatcggttaaatccggatagcaaaccctcgggtctgggagcgaatgagattatgatcagctgctatccgtctgacctgctatcctgctctctgtatggttgctcactttctggcgatggcgtggataccgggctgaccctcgtacacgatgactcggtcggcaagataagtagccatgatctgagtttgcaatcagcaaagttcagcatgtgatacctggccatcagcgcgattggcacgatgatactcacgaaatcgtgctcgatgatcaaggcgctctttctcgagttgaggatgaaacgcttgatcaacttggcggcgctgatacgctgctcagagtccaagctacagggtcaacgcgacgacgatcgttagcttttgcgatggaacactgacgagcaggacgggtttgccgcccccacgctccggactcactaagccgaaggctcgtcgatcaggtaaatatcggcgggcagacccaaaacgagacagatggccacacgctgcaactctcctccggaaagcgtctgcacttcctgatccataatgttatccagctgcataggcttgatgacgtcggtctggaaggtcgggtccataaaggcccccttgattcgcttgaggagcaacatcctaacggtacccgggaacttgggcgagatggtctggggcttcagggagacgcggtattgcaagtgttcggcgtccttttcgttatcgggcttgagcttgcctgccaacatttgcacaaacgtcgtctttcccatcccgttctctccgatgaggacgacgatctcggaatccgagaaaccaccggcttcgacctcgagcttgaacccaccgagcgtcttggtcaagttggggtactcgaactgcttggtgtgggtcgagtagacctcgtcggcgttttcagagatcctaaaggtcaagttttcgtttcggaacctcaagttttcagtggggatgtatccgtcgaggaagatgttgataccttctcggaccgagaagggcatggtgacgacaccgtagatcgaaggttgaccgtagaaacaacagatgaaatccgacaggtagtcgaggaccgacagatcgtgctcgacggcgatgacgtaaatgttgtgatcgagcagggatcggatcactcgggcggcggcgagacgttgtcgaacgtccaagtaggatgatggctcgtcaaacatgtagctgcgagcacgggtcccggggtgcgtcgtcagtgcctgagagggtatgtgctctcgcttcgctgatccacgggactcacacgtcggccttttgaacggcggccagggcgatggcgaacctctgcagctctccaccactcaactgtccgatctctcggtccatcaagttgaccaactcgagctgctctgccaattcgtccttggcgccctccctctcgagcttggcctcgagcatcttgtgcaccgtcattccctcctttttgatctgcctggggatcaagtcgacgtactgaggcttgacgatcgccttgatgttatcctcgaggaccttggtgaaaaagttttgcaattcggaaccacggaagtgtttcaagatctcgacccactcgggaggatcatcgtatcgaccgaggttgggtttcagctacagcaacgacgacgacgacgacgacgacgacagagatcagcaacccgatgtcctcgccggaccggtcaaaacccgtcccccgcccgtttccggctcaccttgcccgcgaggatcttcaacgccgtgctcttcccgataccgttcgtccctacgagacccaacacctgacccggtcgcggggtaggcaatcgatgcagcttgaacgagttggccgtgtatcgatgggtcacctgagagtcgaggttggtaggcaagttgaaaatctggatggcgtcgaatgggcacctgacgagtacggtagacacaaacgcacacacgcacgcgcacacggggtgaatggattagtaccggggccgaacgtcggcgaagtggacgagacgtactttttcacgcagataccacaaccgatacacagatcttccgagatgaacgccttcttatccgtcgggttgacctcgatacagagctttcccatcttgacgaccggacacgatttcttgcattcttgtcgactgtagccgggacgagatcaacggtgtgggattgcgggatggacaagtttagcgggaggggggtaacgttggttaggatggggtcgaggtggaagtggtcgggatgaggacgtaccatttcttgggtttacactgtatgtgggaagaggcaatgacgtcgtcagctcgggtacgacccagctacgatacgtccttctgctggaaagtagagtcgtgaggacggggtacacaccttgtcgtcgctgaccagagcgatacgggtcaacttgtccttctctgcgtccttggatttggagggagccatgatgagggtcgattaagaggtcgggatccgaatggttactggtaggtggatgcgggtctccttgacgagctcgacggacggttcaaaaggagatccaccctttgtctacgaagaggatgagaatgtaaagacaatgtgtcgtatcaaagacgggtgaggaaagtgacggggtgatgaccgacttgaaattaagacgatgatggtaggtgggtggatgttgacaaaaggcgacgaaacggtcagctcgcggttgagagcgtcattcagaatgaaaatgtccaaagagagagagagagcgaaattcaaagtttaaattgaatattcaatttgaaaagtgaaaaaaagtctcatacaactttgccgaccacctgttctagcggtccaatgggaagatggtcattttgccatcacagtttggggggcaagacaacgggcgggcacatcaccaacacgaactatacaagaagacaacgacaaggcgatatatgatctggcatcagagagcaagagagatatgaaccgaattgacaaggtgctcagtgatttatattgatgaccgtcaatcgacctgatgatccctgcacctctctctgcaccttgtcgcatcacgtgaaacctgatttcgcctcttttcgaggaatttcaatcaaaagtgatcgatcccccgcgcgcaacttgcacactcacttcccagagtaccaaccagtgtgcaaactttttcccttgaccctttcaaaccacatactcggtatctttcccatcacataccactttgatcttgttccttttcagactcggacctcgattcgattcccaaaacctctacctcgtctctccccatcacctccttgtaccaacacctcgaatcatgggcaagggaaagaaccacgtaaagaccccgacctcgtcggcgggcaagtcgggaggcaacaagggagagtttacgctcaagcgtgtcaagggtgagtcctagacgtcgagacctcgtccatatcatgtcaccaggtagtcatcgtactgacgaccaccacctcgatcgcctgcctgctctgctcaaacggccaggtgaaaacttttaccgagatgccaagtcggcctcgcgcgtcaagatgctcaacggtgggaaagccgtacgggaccgggacggcaagatcacccaatcggctgctttccaaaagacggaaaaggagatgggcaacgagatgggtagggttcaacccgatcgacggtggttcggaaacacgcgagtcatctcccagaacgcgttggaccactttcgaacgtccctctcggcacaggtggccaacccgtattcggtcctcttgaggaggaacaagctccccatgggtctattggaggaggaaggcaagggtcaagagggcaaacgagtccacattgtcgagacggagccgttttcggggacgtttggacccaaggctcagaggaaacgacctaggttggaagtaggcagtctcgaagagctcggtaaggacgtcgctgatgctcacgcagagaagggtgagtctcggcttgggtgttccccgtcataccggttcaccccatccatcatctggacactctcactgaccccacgtgtatttttccaaactccgctcgctcgcccgctccgtgcagaggccaaccctgacgcctatgtcgaagaacccgcctcgttccaccccgtccgatccctcatgtcggaacccatctacgccaaaggaacctcgcgtcgaatctggggagaactgtacaaggtcctcgattcctccgacgttgtcattcacgtcctcgacgccagggaccccatgggcaccaggtgtaaacccgtcgtcgagtttttgaaaaaggaaaaggcccataaacagttgatctacgtcttgaacaaggtcgacctcgtgcccacctgggtgaccgtgagtttcggattggcgccctcgttttctctcttgtcggcccctttcctctcttctccacacctgcatggtctcctctcctgtcaagacgaacccgtcacacggtcgtcttcccacagaaggagacccctgaaacccacactccagtcaaggcctacgctcgtcctgtcgatatacggacaggacatcaactcctaagcgtcggtctgttacgagagtgggagaacgaatctgcccctcccgaacccaatcgaacgtcctgaatgtcacgtcaaagtaggcaaacgtccgtcctggaccgtctgaaacgacgtgacgcgcaacctctcttctttccctcgttgagaaacgggggaaggaggaggggggactagacgcccgtcagagtttttctacgggtgtcgttatagggacgttcacccacagggaggggcttgggggactcgatagagttgatgtgttcttgtcaaagggtcccgtttcggtacggaggtcgagggtggtccgtagcacgaaattgaggggagcgatccttttcgttttcgtggtacgatcgccacccgagactggctcgtcgtgacgcatgtcttagttttgagtccgacatccctcctctcttttctcgacttttatttttaactcgtgccgctctcggctctcttcatgttctcttcgtatccgatacggacgacacgatgctgacacgttttcattcacgacgctcacgacatcaggcccgatgggtgaaacacctctccctccaggcgccgacgatcgcctttcacgcatccatcaacaactcgttcggaaagggatccttgatccagctcttgcgtcaattttcggtcctccactcggacaagaagcagatctcggtcgggttgatcgggtaccccaacgtcgggaagagtagtatcatcaacacgctcaagaagaaaaaggtctgcaccgtcgctcccattcccggtgaaaccaaggtatgtctttgcggaggcggtgcgcaagccccgatgcgatctcgtgctgacgcactcgctcgacatggtactgcaggtctggcaatacatcaccttgatgaagcgaatctacttgatcgactgccctggtatcgtacccatctcggccaaggactctgagacggacaccgtcctcaagggtgtcgtccgggtggagaacttgcagaccccggccgagcacattccaggcttgttgaagcgtgtgcgtccggcttatatcgagcgaacgtacggactcgagcctagggaaggtggttgggaaggcgaggagggagcgagcgtcttgctcggaactatcgccaagcgaatgggcaagctcttgaagggtggagagcccgatcaggagagtatcgccaagatcatgctcaacgactggatccgaggcaagatcccttactttgccatgcctcctgacaagaacgccggtcagcccgacgctggcaaggagggggacgtcgagctcacgctagaggaaaaggccgttcaggaagagctcgctgttagggaggccgagctcagcaagacgctcggcgagagaaaggtcaagggtgtcgagcagcccctgcgaaacatcatcaccatgagcaagtttatcggggatgacaaccgcaagtttacagacgagcagagcgacgaggagatggtgcccggtgaggggtacgacaagtcggacgacgatgacgacatcgatgcagccgagggcgacgaggagatggcttgggacgacatgttccccaaggcaggttcctccaagcaggtcgctgcaggtgacgagagcgacgacggcggtctcgacggtgatctcgcgagcgatgatgacgagctcgatattgaggatgacgaagacctggaagatgatgacgatgacgatgtcgaggaagaagaggtcgaggaagacgtcgctgctgctgttccttctgccaaggcaaagggcaagcgaggtatgttgtcgaagcctgatcttaccgcctggacgtgcaactgatccgtccgcttctcgcagctgctgttggtgacctcgaggagacggacggccaacgacccgccaaggtgcctcgaatgacgaccaacaagcaaaagtcgaccaactactacacgaccgccaacgtcaagaaccgaaaccgagaacgcaaggttcccaaactcaactcgaccaagagcgagcggccaaaagccaaggagggcaagattaggatgcgacgatcgtaatctcggatgcgtcgacctggtgactctttcgggtcaagatgctgtattcatagacctattgtgtacgatagtgtatgcttccaacgtcgtttgtaatgttgtagatgggcctacttcgagtgacgattcccttatgatatcttttcgtctcttcgcgccttttatcgcctgcagaccaagtctttcaagcattgcacgcgtccacaatcgggcaacaccaacctgtacatccaattcctactagtgagttttgccatggtcttatgcgtctcttcgtgtacgagatccggctaggcctagtttaaaagtaccatctggtgtagctcgaaggacacttggtgatggataccgcttacttggctcaacacgggtcaggccagcagggctacacgacacggcaggggaccgggttcgcacgagacaaggtcgaaatcactagaggtgggttcgagattggtctgattttgccagtcttctcgcacttggctgattgcgggcttgtttctcaaaggtatattggtcaagacgtaagtataatctctcaatttggaacgcattctcaagtcgactggcctgacagccaaccatactcaattgatgacctcccagtgacccagctgcaaagcagttactcatccacctcaacaagaagcgagcggaagccggccacgaacagttcattgtggctgaccgtgagtataaaatgccgacaacgcgaacggagattggctctgatataccttgatggcgaaatggcagtcgatgcggaacacttgatggtcaaggcgaatgtaatggaggaggtcgaaaaggagttccaggcccaggtaagacctcgtttcactctcttcgctcgcatacgatcgctgacatctgtacgtcgggtcgatagctggaagagttcacgtttcgacataccgacgaagaggaggtcaagaagggaaaagcgacggcagcataaagatcgattcacatgcatcaggatcaacggcggatcccgatttacgactattataacgacaactacggggagattatggctgtatagacaccaatattggaacttgcgaactatatcccggacgcctctacgtatcacatccttcttccaaatatcagcttcagaaaccgctcttgatcttgcacaatatcgaatccggctgaatcaacggtcaaagaactatggggttcttttcgctgcccagaggcggtgcatctatgacgcgaaccgtggtcagccatgtgcatgtccccgtgtccttgcactcacgctcgcgccccttcctgcggatgatacccagagccgtcaacaccttcttggagttgtgcttgaaaaggaagcagtgaaacggacgtcggacttcctgaggatgaagcttcaaattccatgtttcgttgacgggctctacttcatgcttctccatcaagtcagcgacatgggccagagcaagcttgaccttcttctcgtcataaggtccggtgtggagacgcttgaaacgagagtcatccgttgaccccctcggagcatccagtttagccctgcgaagctgtactttgatcgtgccgagccccgtagcgacggaacgacttggctgtcggccatcttcggccatggtctgttaggaatattccaacaaacaaagacgctttagaagcgagaggaggggcccggtgctagcctggtccatcttaccagcttctcaaagcgaaacggcctgatcgccgcatccccgtcatatacccctcaaactcgagcatggtctcgttgatcgcgacgtcggtgacaagcgcggcaacctcgagaccgtcaatcgagaggatcgcttggacgtcggggtaatcttgcgtacagattgtatccagatacctcttgcaatcgaccacgactgagaaggtccgattcgggtgactgcagatccagtataaagtggtgggattcatctcccagaagacttccgactctgaaacaggctcaatgggagcgccggcgttttcgagccagcacagaggtgcctcgttgtggttgcgcattttgatttgacgaatacgacaagtaagcctcgtttttcttgtgaggtatgcttccttctccatatccctacacatggttgatgacagctatatacagtcttagcagagcgagaagcttgactacgatcgctgatcgtcgatcaacaatccgtcttgttgttgttccccatgatccacgacgatcaccatcctcgtcatctctcaaaggggaaaatcattgtcgaatggaagaaggcgccggctaattgcctcgctatgcaggaaattatatggtacaaacttgatgatataaactagggaatcgtcgtatgctagatacgtaaaacaagaatggaattgtcgaagtcaaagctgttttcgggcagaatgtggcctcaaaggtcgtagccaccattgtcgagcagtgctcgggctttgacgtgcatagcgtgatgccccggcttgatgtcttcagcgtgcggcgcttgctgctgctgttcctccaagatgtacgagggatgaccgccagggccgtagctgtattcagggccagacacgctcccaaacgtgaaattggccatgttgttctggtctgcgaggccaggatcaccattgtgctcataatatccgtggccatagtcgggacctggagctgtcggatcctgagagggttggacctgactctgaccatcgcctgagatcaaggacgagatggcgagagagctgcgcctttcggtccggccagggtaaaagacaccggccgccaccttgcccaactcggtcttttggcctttccgtctgtccatgtcataagcatccgggtccaattcctccgttttgcgcttcctgccgtccatatcagaatggtacccgtgcggctgtatgttatagtcgggcatgaccgttccaaacgtgtattgagctggagggggcggttgagtcgccgtgggcggaggatggtatgagaatggtgattcttgggtagcgccgctgtttccgtaaatctcttgaatctgctgatgcgtcacttgtcccaagctgtgctgagatgaattgcctgtcaaacgtgacgagtggcccgaggaaccgtgcgaggactggtaaggtgcagaatgaagctgcatcgtcgatggatgctgctgttgctgatgctgtagtatgccagtaccaggtcggcccgtcgaaggtgctgttcctggaagatgttggtacatgtccgctggatgcgacgagcgggtgggatggggcgagaagctcaattgcgtcccagcactcggtggttgtacctgagcataactcggcgcatagggcggagccgacgtcaagcttgggatctgcaaatatggagatgttgcggtccctgatcgatcagagaaacgatggtcgaccgacggagccgaatgccctcccatcgcaagcccagccgatcgaggtggatgctgaagctgtagcgagaccgggtgttttgatccgggtcgaatgccatgaggaaaaggctcgtattgaaaccccgccggaggattgggctcgagaggcgatcgaccgtaatgtccgtagccggagagggcggaagggtgtgagggattcggcagatgaggcgagacgccagccgaggtatgctgtgatgcgtatcctgtgccgggacggccgtcggtacccggtctgtaagagctctctggtcgttgagagtcccctgtgcgcgggggtatccacggtggagggtgaggctgatgcgcttgtgacgtaccgagagggcccccatgcaaaggaccacctaccggagatggcaccatgtgcggagggtaattgggacccatgtcgggattcgacattatggaggacgagatggggtgctgaaggtgaaagcccggctggccggggatcaagactggcggaggaggaggcatatccggaccgaagtgatgtgatgggtgcagaatctgcagatgcccgggtccagcatgtgggtcgccgagtattcccctgggtatcctctttggcttctttggctgcacagatttggccctctcggcggccgtcttgggtaccgagaggacctctccacgctgacgttgctctttcccagctctttgcgataatgccgcatgcactggtgccaaagctcgaagcatgcgatcgttcaagtcaacgctgtcgttgtgaacggtcgcggcatgctgacgcaagttgtccagccgagagaatgctttgccgcagtgacaagggaatggtcgttcgccagtatgttttctgtgcgaggttcaacacggagtgggcacaaatgtcagttctgagatcgatccgagcctgattaacacgtgatctcacctgacgtgacgggcaagatgttcgctccgcgtaaatgtcatttcgcaaccggaaaatcccatgcacttgaaaatctttcccccgctgacaccgaccgggagtgacgggtaatcagcaccccccggcatctgggactggatggcaggcggtaagccttgaaggtatgggttgctaggcccagccattgcattgtagctagatccgcctgggacccgatcgtgcggcctctgggccggtggggacgagtccatgctctgaccagatggaccggcagcagagaaggatgctctcggtaggtgatgggcgccattcgatggcggaggaaagataggcggttgacccgaggggctcgagaacccttgtgccggatcatatgatgtcgacgatgggagaccattcgccggataggtgtaatcgtcataggtcggaggggcattaccggcaacataatcttggttgatttggacctccatattgcggctggaccctagcgagtctgtgttgaggccaatggcgtcgcgttgtgatagggggtggaccgcgttgggaattccgcccgtttcgacctctgcttgtacaacctgttcggctttgcgcttgcctcgaccctttggcttgatcttggtcttgagaggttcgttcgagatgcccttgatctgggcgggttcaagtggcttgacgtcagtggcagtccttcaagcgggcagagcgggcggtcctgaggtcactcacttcgcctgatgctctatcatcaaaggggtatctcccgaactgcgacccgtcgtagtcctttcgcacaatgccttgtgtgtcctgaatccctgtcgacacgccgtacggtatggtctggtcgattccggcccgggggtttccactatatggtcgaacctgagcgtaatctggtccaggtggttccccgtaccctaagatgcgagagaaagcgagtcaggctgcccgttcgttgagacttaatgtacaaaacgctcgagcagaatcggaaatcggaagacaagattgagtcgaggagatctggagggggggttgcaaagctcgatattgagttggcttcgcctctgcagagcaagcagtcgagagttgcattgcgaagcagtctctgaacaggcaccacggggaatctcgtctttccattcggagccgcgggcacccacattcccattctgcccctccatgcgatgttccctccgctgcttcttttcggccactccccctcgtctctgctcttcgcgtgattgcgaatacagatccacctcggtcgctcgtcatcgacgagcacaagattcatcctcatcgtcggcctcgtcccgcgatacacgcccggacagccatcgccgagcctgtttttcgttgatgactccccgcgcacgcggctgacaacacgctcaagactccccgtgggttcgacaatacgggcttcacgcgggtacgtttgagacccgtgcatatagcctggcaacctctagaattccgatgaacccatggaatgccctctcctcgctgaacacatcgcgaccccagaaatcacaagcgaaacctcgacggaacttttgtgagtgacatacctcgtagaccccggctaggttcggcggcgagaccttggccaccttgaccttcgttcattccacccccttgtacgtccggatccgtcgagtcttgagattcgagctgataggcgaccccggacgactgtgccagagaggcagacgaggtcgaggtcgatgaagacggtcggggcggtggttgaagcgaatcgtcgacagagagatgggtagcgagggaaggacgggttatcccgaccgatgcgtcgcgttcctcgacgtgtccgctatcagcgagacgatcgtttgtgcctgtatgcgtttcgaatcggtatggtagctgcggttccgacgggtaatggtggggtgactgctggaattgtcgatcgtctcgttctggaacatggagagatgctgatgctgatgatgtcaagatcgtcggccctgacgtcgccggttctggcgaggtgatgatgatggttttgatgaaatgggtattcacgttgcctgcatgcgaatgaagcgaggtcgggtatgtatcagcaattgaatttgacgactgggaactcgacgaccacctcgcacagcgagcgaaaggtagagctgggtcgacacggtcgtgcggataataacgggaagtgcgacaaagctcggagagagggcatgaagagagaggggcgacacgaaacgcagggactcaccggacgatcgatgttgttcgaccgagtggcttggacctggtgaatcttgttcttttcctatattacgaagagcgtgttctccacctgagtcatcggcgtgggtctgatctgatccctgtacgacgtcgacggcaagcaaggaatactgctgttgcgtagtggagctaaaggaccctcgggcttcgttgtcgttgtcgtcgtcgaggttggtcgatgcgttgtcaacgtcgtcctctaccgcgtcggtcagaggtgctgcgagtcccgtgctagagtctctgctggtctgagggacggaaggtcgtatcccccgtgctttggtagcctggtgactagctgggtgaaccgtatcgtcaccgccgatctcgtcttgctgtagcttttctgaccgatcgctagctctggtgcgaggtacttccgggctgccgatcaattgcggtcgtggagctggtatggggaccgccgaagtggacgaggcgtcgagcttgctatctctcaactcgtgaacggccgacaaagaaccttgttcgaggttcgtgggtgtacggtcggatgattgcgaggagggtggtcgaaaggacagaggacagaggtcttgccgttgggtagtgatcagccctgttccctcggatgatctttggttcgtcccgtcgtggtcgtcttcgtggtggtgatttgagacggaatgatcgggcgggtgcggcgtcgttgcgagtgagagggcgaaagcaggggattccgccgtggaaccaatgcgactggagcgatgatggtggctggctttactcgtagttgaaccgctgctgctgctggtcgttgtcgaaccctcgtcgagctcgtagccgaacgggacaagtcgttgggcactaatgaacgccaccgattgtccagacggttccttggaacctttttgagctccaactatctcgagccgtaaaggtgcccccgtcgcgttcgatgatgcagatgatgaggatgctcttgtaccgtcgtcaatcatgatgcattccggttgggggaagtatgggggtaaaggtatggaggaggaggaaaaaaaaagttcggacaaccaagacgacgacgacgacacacacgctcgcacacacacacacagactactgctacacacggtccgtcacaccccacaacatgcgtcgggatgtttgatcggtcggttcgtgtctacgcccagatctcgtttgtcctcgcccgtcgcctggcctgcctttgcccaagaacttgctccttctcggcgcgcgctctttctcccacaatcgacttcaacaggttctggttgccgaggatgatggtcggaagttctgagtgctaccaagtggaggctgaccctttcacttggttcgactgtgcagagcgaccgtcgtcgtcagggaagagcgcgaaaggagggggaggggagagaagggggatgagagtgtggatcgaatcggacctttcgggaggtggtcgtagcgttgcgttccgaagcgtcaaagccgggtaggaacaagacttgttcggtcgatcggcgggccaggaatgggagtgctatcgtcggggtgcgtggttggggtggaaggggaggagggccgacaactcgtccaaacgaaaagagagcgaaaaagcggatctgtggtgagtgatgggcggataagggcaggacagggaccaacgaaaccggggcatgggcggcggaattatgaatattcgtgcctgtcggtccctggctcgtggagaggcatggccgtgggcatggacgtgtcattgacatggttaaaccatttcgccgcgggccgttatcgccgggcatcgcgagacaaggcccaggggccgaaggggacggcggacggacgcctggggcaatcggctcggtgtaacccttgacccggcctggtgcaagaccgaacgcctcagccattcacatccatccaatgatacttccgagcagcatgcggcatgcagacagtgagcgatcccgcccacgcgtgcctaacaaaaagggtcgccaaagtctattcaaactccagcagccgagtagacaaaacacaaagggggagtcatcttcccgtcaaagacctcgacttgtcgatatccaactcggacactccacaacactggttcttcggacaacaaaggcgaactatcgccgaattaacgttttttctaaaccccggtcggtcgggggtcatctttgtctttatctctaacgtcgcacgaattgccaagcgaggcgaagcgcacgatgcgactcggcatccccggcagaagccatggctttgatactacccagggggtacctcctttgtttcagacaataatgtcgaggcgcatcaagggacaagcgattcaaagggatgtcgatccatcggttcgtcgaccgggatcatgcccgggatgacgtttgaccggccccgctgacgaaagtgcgaaacagacgagccgatcgagcggcggttatacggcatctatcgaacccaaatgcaccccccataagatcatagtcatcattcgctttcgtttgcataggcgagggtaccttgtaagcctgtgattcatcacgcagcaacgaccatgttcccccaatgattccagtgcgctgtgatcgaactcaatacggtttggacctcgagcagtgtgcatctgagtcaaagatcagcacgtaatgttctcgatccacctcggctccacgcatgccgctcgcgcaaagtatagtctcgaagcgagccgatccatttggaactctgtcgaaggatcatcaagcgccaatcgttgaaaccgaacaatccaccgaaaggacatctcggccgttccagaagttgacgagcgacaacatcaccagggattccggatcgtatgtcaccctactgcgagacgtccgagaaagaaaagaaagcgaaagagaccagatgtgcttctatgactaggggcttgctcgaggctttgcatgtcgtgactgctgagcccggctcggccgggcaaacgtcggccgctcgattcatttggaacctcgagaattgcgcgtaccgagccgttttccaagctcgtaacgattggccatccttggggcccgagccctcgtaaaaattggaaacagagtagcgacagacaaaggtttcacgaatacactgtcctcgacgcgaacagcgacgaaatcgagaaaacgagcaagccgcgcgagtgaaaaacgtacacgagatccggccgtcgcttcggcagcgctcacttcggctcggcccgatgaccagatcgatccaccttgccgttcgcccggtgcggcatccatcaagccgagtctgactgggcaacatcatcagtcttctttacgtttcagctttgacggatctcgggcataccggtgcaacactaaaacaagaggattgaaccgttacaacacagttcccagtctcggcatcactctaagaactcgcctatgttttcggttcgactcggtcagcttccgttttcgaatccgaacccgtgataaatctccttcggcagcagtctactatcagagcccgctcgagatcccaaacgatcccggtccctgcatataggtgttgatcccgtccgaagttcagccacaagcgcacatttcccagaagggccgacgaggtcttttctcctggctgtactgcgatcgagtgaaacctcggttgcgcctgctccgccattaggaagcggtgggacggggcggtatttagcatcccgcatgcagaagtaggtatcacttcgattgctatattattatcgtacactctgtgttcatgacagggattaatctccgaaataaatgagcacttcatgtacctatcaccaattgatgagtatcgggaaaactaccgtggctctgctcaagacgtcatcgctctgtgagttgaggaagtccatcgcccctactggacaagccatctcttctgtcgatcatcgagggcatgatctcgtagaaccaaattcggtacggtacgatgtcgaactaaggcgctgcgtgaccggctttggccatcgtcgccatcggcttgggaatcgccgtttctctcatcggggaaagattgaagcctcacacgctactattcgcatctgtaaagggcgccgcgctcgccttgtgacaaagattatcctcgttccaataacgagatcaccctgcgcaacgatccagcgatgctgcttgaccatcgatccgagacccagcaggaagccggatggctggagttcctctgcgcgtctgtgcgtaaagcgaattgcttattgaacggtggccgagctgtggatccacggaccttggagttttgagctgagcaagcatcgcgttcagtctccgtgtaagacatcggagatgacgaggttagagtgtgcaaaggtttcaagggccccttaccgcacagccctgagtctcgtccatttctactcggtaattctaattccactccctttccagcaacatcgcacagatcgccccgttactaatggcatttcgcttgcgcacacctgttccatacagttcaggtgggatgcgcagttcgccatcggtagacaacgaacgggtgggttctcgcagtcggaaccattgcgctcctcatggtcaggtcaactgagcagttcggtaaatgagaatgcctaacgaaaccttggcggaaatgtgcgtgaacacgttatctaggcgagagaagtcgtcggccgacagtcttgggtatgggcggacgtccaaaccggtcgcttgtagcattcttcaaagatcctgactattagatactacctctgttctggagctaacgctgcctcaataatgtgtcaatgtgtaatggacatccccttcggtcgccctctccaggatcgtcgacccccgccacgttttcttcctctggcccccaactggtcggtgctttgccacaggactcaaaatggatagctacaagacaccccgcatcaacaaacagagatgccaatgataacgattcataacagccggatctggagtgaaggtgttgtggtaaccccgaacgatctcgaatgttggcacacacgactttacatccatggtgcgtgaatccatattttcagacggcatggaattacgctggccacgttgacaaaccggatgtaccggatacggcgaagcgccgggatatagtgagcgttcatgcttgtcggacccgtcctcactgacggcttgtgatgctcaaagtctgccctgcttcctccttctgccttgcttcttccttctgccttgcttcttccttctgcctcgcttcttccttctgccttgcttcctccttctgccataacgctatcaagctgacatagcacttgatctcacactcgaaagcggcccccttcagatcggaaagacctctttggtcgaggccggtcttgatttggttcagacagtcattcacttccgaacgaaattccatcgcaacgtccttgaaaaactcccagtcactattcatttcctcagcctgcagaagagctggtcaacggcttgacttgtgaattgtccgatactggagcggactcaccccatagagttcgatgtcctcgtcctcccaccattgctctttttctttgagggtctgcattccgaggaatctgtcggctttgcctgccgagaacatgatctatcatagtcatgcggcgaaagccagcactgtacttagtgagcagaaccgcacgtgtaagcaccgaagtcctcacctgttgtaccatgagatataactgtgattcagcgtcatcaatatagcagtgctgattgtgtttgtccttcaacgcctgttcgtccttctcgaggcgtttttttcggtccgccaatcggacgaattctttctcctttcggtggtcgagaatatgctgtgctttccgaagtttctcttcatacaccgctcgcccggccttgtgcttcaaggccatgtctgtgagtgcatggatccgtcggctcatgaacatcaaagtacccgaacgggcatcgtccaagcatagctcctttatcgggatgggattatcgtctgtctgtccacgaactctcttgcgataccgagcgttcccgaaatcgatgagtacacactctcctgatacgctacgaagcacgttgccgttattaaaatcgcggtaatgaatcccttgctcggcaagccatttcagagtttgagtgagacttcgatgcagaagaacgtgattgcttagggttggtaaatcctcgtcaacgtgacggccaggttcacagaatgtgaccatagtcgtgtttcgagtgcccccatccgccgtcctccacttgccgagacaggttttggtttcggggatcgagttggtgacatgaccgatggggaaaggcaacagcggcacgaacgacccaactgctttgcatcggttccgggcttggtcgatatggcccaagatgtccagctcatgaccgtacagtctatcaggcagccaggtactcttgatgatcatgggaagatgtccatgagagggtgtgcgggacggttcgccaacctgtacggccgtggctgaccatgcagcggtccttgaaccccaaattgtaggtgagatagcgagccttgtgacttccgaaaggcgatattcaacgttttgaccatcgggtttctgcaccgataaattctcgttgggcgatggctcccattgttcggatacgaggaaagccgggccggctaaaagcgcgatcgcacaaacgatcgattcgtagtcgtcttcttgccggaaactgtatgcgggcgaggtgctgagctgcaccgtatcagtctcaaagatgcggagcaaatgcccgcacaacgagaaagatatattcctccccgagactggacggttctgtaggagtcgccgctgtagaagacaaaaccacatcagttgcagcgatcatggaagccttactcatagacccgagccaatgaagcggactaactaagtaacgaagcatctgaccaagcaatgaatctttcaggtccaagctagcttgccgtttcacctcgccaaatgtgctggcgtgatccagtctcctatcctcgtcgccatcagagccttcgccatgaacaatgatgtcaaatttgacttctgaagaacctgcacccttgcccgcgtggggtatgtgaccgtcttgcatgggcttgtggcccgagaaccggaaaagaccggaaagcggttgctcatcctgccccgcttttgcccgcgtcaggcgctgcacaacaaggttactgaagttggcgaattctttcgcaagttcatcttccccgcctgaggcttttttcctatggaggggcttgattttttcaacaagtcgtccgagaggcgaggacgggtccttcatgtcgtaaacgatacctttgagagtctgttggaaatccgtccgttccgattcttccatatcgccagatggatggatctcaatcaagcggtctttcagcctgccgtcactggcagccaataaagcatcttctatctccttcctcctggctgccttgacattcaagctcgtctcgcacgtccttctcggcgtgccagccgattgtagaatgtgctcggcaagagcaagacgggtttgtatagccggagaactgtcttcattggcaccttgttctgcagaattttcttcttccacctcttcgttaggtggaaggtagtttgcatcgactgccgggttaatctcccagtgtgagtatcgtgcgtcgtatatgcgggagctggtctcggaggtcctgtcaagcagatctttgcgctgacgtcggcggcggtccaggacctcatccctggtgtccgctatcctataagatatcgccatcctgaatctatgacgtgcgcattttgccgtttgaggggatttcaagcgactgtcttccggcaaggcgatacaggtagtactctgtgctttcatctgagatccgaaggcaggacgagagaattcgaccctttcaagcaagtcaggagcgtgttgattcgcgggaaaagcagcgatagcctctttcgtggtctggaggggcggtatttctccgaaaacatcgccttcattttgtagcggtcgctgccgaagtcgtcttcctgtatcggaactcatggtcggttcggctagaggcaagggccccgagagtggatatgtagcctgagaggaaaagggaacggatcaacgacgcgataaggtcctccttctgtttcccacaacttactgtttggacctgattgtggaccgtatttcgctttcagtagattgggaccacgagctggggaaagaacgggaaattttgatgctttcaagctgtggagaacctctcatattgtcagttccctattgactcgaagatatagtaggatccctcgacggactcacctggttcgctgcacgtataattcgtaatattccgttggaggacgtcgtcagggttgtcgttttggatgatattgttcgttgtgtgtaatcgtgagactgtaatcactaaatgttcaagttcaacgctgctaccgagtcgtatcaggctatcggctgtgatctagagatgccattcaataaagggatggggttgggagggggggctacatgatcaatatgctgccatcttggaagctgtgagcgcagcttcaaattgggaaggtggcttactgacttgggatgcgggaaactctgtgaaaagaggaaggcagaagtcattgtaagattcaggctcacagccgaggtggccttgttcaggcgattacaacggtcacggctggcacagatcgcttccgagcgaatactggctcatagaacagtggatgggtcgtccggctgattcggttgtcgttatcgctgctggattctggcccctcccaaacgatcatcaatgatcatcaaatgatcaatagctaatatatttcacatggtcacatgaatatgctttctgtttattcgtgctccgggttgttgacgcttacgtaatcatctatcagcataaacatctatctcaccgttaagactcttctcagcttcagtttcaagctttagctagatcggtaggctagctcacggatcatgatgctcatttgtgcgggaaaggaacttatccctttctgacgactgtgtacaagaatattctcggtgaagaaatctgatgagggtttcgaccacgactatgctaaacatgcgatggatcaaaaggggaaacaaccacttttgaggcagactttcagtcctcgagcccgatgacggtgtttttctcctcggagtcatcaaacgggatcctgtcgagctgcgcgtcgagcaaaagaagatgcgaggaattgttcagcgccggtgggctctgacccgatgaaaggctgttgactcaccgtgtcaatctcgacgagcgactcctcgatcagcttgatcgccttgagcaaatcttcctcctcgatgactaagggaggagcgaatcgaatactgcggggcgggacgatcagtcgggtctgacatcaatgcaaaaaagtcaatcgaggcaggactcacatgttgacgtgagtgggcttggcgaggagtctaaacggcggaatgaattgagccgttcactgatgagcgatttctttcgactttccccctggctcgcggcgacttaccccttgctcttcatcaacagacataattgccaagcggacctgcctttcttgctcttggtctcgtcgatgacgacggcgttcaacaaccctcgtcccctgacctctttgatcaacgggctcccaatctccctgaccttggtcctgaaggtctctcccaacctctgggctcgatcgaccagaccttcgtcaacgagcacgtcgagcgctgtcatggccacggcgcatccgaggggattacctccgtaagtcgaaccgtgctcgccgggtccaatgcagagcatgatctccttgtcggcaagaacggccgagacggggtagataccacccgaaagggccttgcccagggtgacgatatcgggcctgacgccatcccattcacaacagagcctgcgagaggtgagcaaagcgactgggtgaggcccggcgcgggttagatgtggcaggcgtcggcgatcgcactcacatctttccggtacgggcgagaccggtctggatctcgtcgcacatgaacaggacgttgtgtcgcttgcaaatctcttgacacttggtcaaataaccgtcgtccgggacgaagatactatagtcgattggatacagcatggtcagctcgagctgactagagaagacgtccagacgtcgtggctgatctcgaaactcacccagcttcaccctggatgggctcgacgaggaacccggcgacttcatggccgtactgctcgaggtacgcctcgagatcctcgggatggttgtacctgacgagaccgccttcccacttgggtccaaggccggggacaaacctgtcgaaccgggcacgaacgtcagcacaccagcacacgcggggtgagggctggcttctcgggcacgacggcctcgtcacggcgaggtggcagacttacggtccgaatccgtccctgctctccgggtcggtgctcaatgagatggctcccaaactcctcccgtggaaactcccatccacactgatcaccctagccttgccctgctcgataccctttttcatgtatccccacttcctcgccagcttgatcgcagtctcgacggcctcgacaccagtgttcatagggaggaccatgtcgtacccgaacatcgaggtgatcttctcagcgtagggaccgagatgggaggagtggaaggcacgggaagaaagggtacagaggtgggcttgcgaggtgagggtttctaggagacgggggtggcagtgtccttggttgacggcgctatgacgatcgaggaggtggcgaccatttcatcagtctcttgactactacccaagcacttgcgctcctacagctccgaagagaagactcacgagtaggcggacaacatgtcgatgtactcgttaccctcggggtcccataccctgctcgttccccacatcgcaaaagaattccaggtcgagagcggccaagaggcataggagaatgaaaatatgggagatgagactcgatcagtacgttgtagacggtgcgcgcctagatcccgcaaggtagaggtcgggttgaaaacgagcctgatactgacttggctcctagcgcatggtcgaacacgctggtcaaagggaaaggtggacaaggtcagcgagcggtccacacagatgtccagatcgtgagtttagcttacacagggagtgggtgatagttgtgtgccgagtgctattcgagtccacgacgaacgacatgaaaaaacaggtcgggcagctttgtgtaagcccgtcgagtcgacaagtccggattcaagcacccatgaccgacctcatgctccaaatgaatgatctgctcggaagagagcttcttgcccgatcctccgtgagaggattgcttgggtgcgtgagtggcgacgggggacatgatgcgaagaggtgcaaggtttgttcgtggtctgtttgtatcgtcaagactggtgtattgtcctccaagtcttgtcgagattattgtgtgatctgtgtgatgacctgggtgtcgggtttatggttgtgacaaagtcgagacggagttggggtgagatgtagtcaaatactatctaggtagagtagctagctctcttgccctttatccatccgtcccctcttccctaactatccatgtgatcgacctttatccgtctctcttggctttggcgtgactctgcctggccccactctctcctcgcttgcctttgcgatcttcccgtctccgccctctctctctcttgcgcccttccccgcgtcgagaacactcggcagcgtttggaccgtcaatcccggataaaccgataaaaaaggccccctctcccgcgatcaacacgtcagacatgttcgacctagcaacaccatcatcgtttgatcgacagtaccatgatcacaacctgcgtgatatccgagatctcaaggggcaaggcgcaaggagcaaggggatgatgctattccaggcggcatgcaagatgcaaactgtcgatcttgcctcatataccccccaggctgattgacgagacgcgcgagacgcgagatgattcctttcaggaccgggctcggtcccgcctatcaaagggataaccgctcgtcgatagcctccgaagagatgacataagatgccataagcaccatagttgaccaaatacgcgtcgccccatcaatcacatcaagatctagtgtatcgcgaccccgaagttgccaacgttcgatcagctgttagattcatcatcatttatcagctcatcaccgtccgtgtagatagacgtcgcactcttcaaccaagtctcggtagtagcggcattcagaccgttatcagcagatcatactccgtagaccgacccactcgagagctccttgcacaagatggcggattccaaggcgaaaggaggtgcttatggggataattcggtgagctgcccatgtcgtccttgatggcctaaaacttagcactcatccagcttcatccatctggatacgtccatccatacgattcgaatcgacatcaatgccgcccacctcgacgaaactcacggaccatctccatcctcccggggtcgccatgacagaacgactatcggcgtaaatgggacaaggacgaatacctagccaaatccaaagcccaggatgccgccgctcaggaatacgcccaggccgctcaagccgcccaagcagcgggcaagaagcctccccctcgtccctcaagagctggacaggatgccttaggaccgaaaccgacgaaagcgctcgaggcgcgcgaggaggatttggggatagagaggaatttgggaaagagcatgttggtcgctccaggtggtaaagggccaggagcgggattttacgtgagttccgggtcgggcgatgggggtgcgaagacgatcgttggggccggggtttggaggtgttcatgagcttccagggggggagctcttgatcgaatctggcccctcggcagaacctgctcctcggcacacctttataagctgtcataggctgatcccttggtctttctcttctggacgcgtcgcagtgtgaaatgtgtcgacggacgctgaaagatagtatcgcctacctggaccacgtcaacggacgaagtcgttagtcatacctcggccggacatgggctttaccgcccggaatgacatgttgatcgcttctgcatctttcccatctctccgtctctccctccgcttcattttcgtgtggcctcgaaatgtctgattcctacatgtctgtgacgaccacgacacgacgtccaaccccgtcagacctggctcgactcggccaaaccacccaagtccgacgttcgaccgtcgcccaggtccgagatcggatcaacctcctccgcgctcaatccctagaaaaagtcacgagcaagaatttcgactttgacgctcgactacggctcgtcgcccaggaagaggaagcccgacggaaagagaagaaggagggcaagaagcggaagcgcgaagaagctcgactgagatcgacacagcaaaaggaggatgaagaggatgggatcaaacgaaccaagggagcctttgggaacgcgaaaaaggagcaagaggaagaggatcgaaagcggcaagaggaaaaggcgttcgaggccatgatggggttctcgggtgggttcgggggtggggtcaagaagcgatagtggtcaagcaatggtttcgcagtagtcggttgtattacgtctagagtagtggtagcatagtatcaaagcagcagtatagtctctaccagggatgatctgcaatgatgaaagctacaggcaggatgtggatagcaacttatcaaaccgacgtcgatgacgtaggtggtgatgaccgctatcgcgttttcccacgcgtcacctcgtcgagatggctgctctctcatcgccggtgacgaaggcagcgaagcccctcgactctgctccgacctggggttgaagggatggaacgatcatgaccccgaatttgaacgactctagctcatagagtgcagtgcttctatacaactcgtacgaacctcgatcaaagccgtaccccgatcgagcctcaaaacgctcgactacgaaacgccgaacaatcgcaccccgagacgcaacatcatcgtcgtcgttggctcatagcgtcatcggatcagcccggtccacctcgttgaatcgaccgatttgtgcaatcgtggatccgcaacacaactggatcagcatacaaggaaagcgtatcatagcaggcgataatctgaagctacaaacgcgtcggcatcatgtcatacgtcgctattgtcaaggcgttgtacgattacgaggcacaggacccagaggaggagttgtctttcaaggaagatcaggtcttgtatgtcatcgacaaggaggacgatcagtgagtctgcgcattgtgcaagtggccgggagtgaattttgggtgctaacgagccatacggtacagatggtggaaagccaagttgaggcccgaggatgaggtcgaggaaaaggtcggattgatcccggctagctatgtcgaagaggtaagtcgtcagcgaggccacggcacacacaggatgacctcactgatcatacgaacctctccgcctatcagtctcaaccgatctctcacgctcgggtcttgtatacgtacgaatccacgtccgaggatgaactctcggtcgaagaggaaaacgtcatctcggtgtatgagcatcaaggcgaatgggacctcgtcaaggtgatccaccctaccgaaggtgccgcgatcgggtttgtacccgccaattataccgaagcgctccagcccggtgaagccgaggaccttgggttggccaagggcaggctggaggaagggggattggtcaaagaggtcgaccccgaggaacctatcagtcccggccccggtgcgggtgcgggggggatgttggcagcgcctatttctcgagctgtgaccgagtacgctacaccggcagagagggtgacgagtagccatgcggctacaggcgaggtcaaggacgaggtcgagacttggagcatatccgagctggacaagaagggaaagaagaagaagggcactcttggcgttggcaatggggccatctttttcgcctcggagacggacaaggtgagcatcgcaaaaggtcttcttgatgacaccatttatcgattctaatgtaatgctctgatcggtgcagactcccgtccaacaattccccattgatacgctcctcctctactcgaccccctcgtccaagacgatcctcttccaatttgcgaccgcaccggaaccgcttcaataccactgtggtgacaagtcgacgacggacgccatcatggccaagatcaggcaatcgaaagagatcgccgcgggaggcggagctcctcctgccgctgtcgcctcgccgccaagagccgaaagctcaccttcggctcgcggagtcaggttctccgctgaacccgcggcgtccttccctcctcccccacgtcgggcagcgagctcggccatgagcgtgcccaaggtctcaaccatcaaggcgacggcgttgtacgatttcgaagcccagggcgaggacgagttgacgattgtcgacggggaggacttgaccgtggtcgagagggagaatgacgattggtggacagtcagaaacgccagcgggcaacagggggtcgtccccgctcaatacgtcgaggtgagtcgtgccgtcgaaatcgcgcatcagtgtagtccgctaacgggaggatgtgtgatcgtgtgtgcatctagttggcgaccggaggcacatcatccgctgcggctggaactcctgcccggctcgattcggatgacgagtctgtagacgatggggctgccgcccgggaagcggaacaacaggccgaagccgagcgtcgtgaacgtgaacgtgaagaggccgaggaggagaggaggcgggccgttgatgaggccaggcgaagggaagaaaaggaaaagagacgggccgagagggatcgtaggcgaagggaagaggaagctgcgcgaaggtcagtcgattggcatcatacggtattcgcattgatcaccggaaagctcatttcgttccctccgaatctagacgcgaagctgctcgacaggctcctccaccagaaccacccaagctgaaacagcggccttcagccaacgacgtggcggctgctcgaaacttgtccatccccaagggtagggatgcacctgacaggcctcgaggcggagatagcggcagtggcaagaacagtacgttggtgagggggcaaagcgatcggaatcggcgtactaagcccttggacctttcttgacaggacccaacccctcgcgaacgagggtgtggcacgacaagagcggtcaattccgtgtcgaggccgagttcttgggtttgggtaacggcaagatcaggttgcacaagctaaacggtgtcgtgatcgaggtacctctcgaaaagatgtcgcctgaggatgttgcctatctgaaaaaggtcacccggaaagaaaaggagaggtcgcggtcggctcgagacccggaagacgacatgcctctggctcaagttgtccagacccgctcgccggccccgccaccctcggtcgagacccgggcgagaatgtcgcctcccgccttttctcctccccctaccgcggcacctcaacaagccttccgaccaaaacgaagcaactttgactggttcgaattctttctcaatgccggttgtgacatggacgactgcacccgatacgcaggtaactttgacaaggacaggattgacgagagcatcttgccggaattggatccctcaaccctgaggtcacttggtctccgggagggagatgtgatccgagtcaagaaggccatctcggccaggttccggaaacatacacccgaagaactggagcagatcaagaaggacgaggaactcgccaagcagttgcaagaggaagagtcgcggggcggtggcggtcgaagcagtccggcgaccaatctctttacgggacccgatggcaaactcgccaacaatacccgtcggggccggcccgagcgcaaggggactgtcagctcggtcgacccttccagcatcgcctctgcatcggagcagctatccaggaagccgtcgccacccttgttggcgccctcgccaccccccgctcccgctgcgcctgagccccccaagccagctccattgttgagcgggttcgacgacgacgcatggacggtcaagccagagatgaacaagtcggccactcctcagcctcctgccgctccgacgccgccccctgcgcctgtcattgcacctacaccccagcagacatcgcagtcgctgtcgaaccaggtcaacaacttgaacctgaacaacaccggcaactcggccaacaacaacgacatcttttcccagatccctcagaacagaatcgtatctcctaacgctaccggccaggctatgcctcagagttaccatgcgggtctcggcatgggcaattcgaacatgtcgatgggccagatccaacagcaacaacaacaacaacaacagcagcagcaacagccgggaccgcttgcacctgtacctgccaaccaagggctgttgaaccctctgatcccgacgagcaccgggttctctggctttgttcccacgcggcagtctatgaactcgcaaccgactggaatgatgaaccagcagactgggatgggaggcaacattgggatgatgcctcaacagactggatacaacggaaacatgggcatgatgccacaacaaactgggtacatgggaggaatgggtcaacagcagactggctaccagaatatgcagcctcgtaagccgtctccttggatattcgatcgtcgcaaagaccgactctgatctccctgcgcctatcacagaaatgaccggttacaaccctatgatgcagcaacagcagcagcaaccgcctcaaaacgccatgttcaaccagctctcggccattccgccgcaaaagactggaatgcctcaaaccgagcagaccaagtttgaccctgccaacatctttgccaagatgaagactcagggaggttcaggaccaagcgggtccccagcgcaatctgccggtgagtgaccacctcgatcgataatgaccctattcgcatcgcggatcgactgacgcccgccgtggcttttctactgcagacaagtacgacgctcttcgaccacaagcgaccggcctcatgccgctcacgaccggctacaatggtgcgatgatgcctcagcagaccggcatgggcatgatgtctcaacagactgggatgggcatgatgccgcagcaacagacgggttacaacatgggtggcatgggcatgggcatgaacatgggcatgggaggtcagaacccgatgttcatgcagcaacaacagcctcagcaacagcagcagcagcagaccggcttcatgggacgtcaaggtggatacgggtactagtcgctcgcgaggagagtaatcggaaatcggtcagactgtgtcttgttgtaggtcattatcgtcataccgggctatgctttcccaggtggttcgagtagagtatttccgagtttgtatgatgcaatatcaaatcttgttttacgaaaaggtcatcgtagtgatgtagggtgctacttggtctgataaagttggtggtaggatacaacggtttgagggaatacaaaatcgaatgtcgggtcgagctagagatggattcgaggcgatgtgtatgcggactctggatcagtatcaggcgtactgcgagacgagacccgtatgaccatcagctaccgtttcgcccaatcgccattcgatccacactctgcgggctctcgactcactctgttgaaagttctggagaagaaatcgttcccgcttcctgccaactttccacctcccccgttcttgcccgcatagatgctcttgaccgcatcgctcatccccgccgctttcctcttggcctctagctcggccagttcagcctggaccttgccggatagacggaccggtccacccgacccttccgtagaggaaaccttgacccgtttacccgactggggatcgccggacgtgaggtcgaaagcacgaccccccacctcggatttccgtttcttggcccccgtgttcgcgccgccgttggtaccagcgtttgactttttagcggcttttgccgcggctcgagcggcggtgaggtcatgcagcatctgggtttggtattccggtttcggattgaggggtaaccaccaggccgaccctttacccgtgccgaagccttccgaggggtcgaacggttccgagcaattcgggcagggcaggactttctcgctggtgacagtggtgccgtttccaccctccttgtcttctttctgcttggggggtgaagacgaccccgacgtcgaggcgatgacggccttgatcccagcctcactgaacacgcaaccgcagtgtcggacgagaccgaacgggagcgctccggtcatctccttcatcgtcaacgggcagataaagggggaccgggcggtggcgtcgagatccctgttggtagatggtcctgatgcgccaggaggggaagagatcgagtaggtcggattgggggtgacgttcaggttgatcaggtcctgagagtaggcaggcaggcaggcaggcaggcaggcagggttgaaggtcaatcgggctgcccccgggggatggacgagtatgtgtctctgctcaccttgacacccttgacgtatccgcagatctgatctccatcgccgaaactcgtcctatccaacaagtactcgatgatggcgtccttgttataaagcttgccgagaggatccgccaccaccggttgcgcgagaggtcgctgtacggtccgtcacggggatcattcgttgaatctcgtcagtaatagagagcgacccggggtctcatggtcatgatagtgaggtcgatccgacgcaccttgctcaaagcacacaacagccacaaggctctcgctagacctttctcgtcggtcttttcctccttggcctttgtctttactaggtcgatcctgtaagggatactaccaccatcgttacccatttctacagaagtgtgtgtgtgtgtcgaggctttaggaagagggtgagactagtagtgtaagtaagatgtacctggtcgttgttgttgtagtcagagtgaccatcatcatgcatcatgcatgtcaatgtcgagctgggccgggccaaacgagggaaaagaaagtgaaaacatgtcaggttgattgccaactagcccatgcagccatgcagggtcgaccccctcacaaactcggacagtattatcatcgactatgccatgccaatcgacaacccctcgtcatcggcctacctcagcattccactcgcatcatacgacgtatcgaaacgacgatggggaaatattattgcgactactgcgacgtgttcctgtaagtctcgacacggacacgagcgaggtacccgaaaggttgcgcgatcaagggagagctaactcatggatcatcgacttgtatctctagcacccacgattctcaatcaggttagcccgtggtgacgagcaacgacgatgtacgaggttggatggatgtgcaagttgacttttcgcgaaaccctcgcttccccgctctatagtaagaaaggcgcataacagtggacgaaatcatgtacaaaacgtgatagactattacaacggcgagtaccttctctcgagcccacttgtgacgcttagaacatccagctgatccgccccgaggaaacattcacaggactcggacataaccaggctcagtcactcatcgatcggatcactaggcagtacgaaggtggaccaccggggatgggcatgggaatgggaatgggaggaccacctgtgatgcgttcggccaacccgcctttcatgggcggtggacctcaaggtcagtacccggaagcctccgctgggattatcgtgaatcacacttgtctggggatactgatcaccgcagccgtattctcgtcgtcgtcgtcaggcttccgaccaccgcagggttaccctccgttccaaggaggtcctcctcccggtggccaacccttcttccctccacctggcggtcaaaacttcccacccccccagatgggaatgggcgggatgaacggtggataccctgcccgaccacctcctcaatctttcggcggaccgggcatcggggccggcgcacccgatcagagtggatcacccatgcaaatgcaaatgcaacagggacaagcaccatcaccttccccggccggacaacctcccgtcggacagttcacggcggctcctccgggtgcggccaatggacgagcaccgatgatcaacccggagaggatgaggatgatgggcatgtaaacagagcgtccgactgatcacgacggaagacgagtctaccgggacgggaggggcgacacaaaacgactcggatttccccgaaggggatcccggacgaggtcgagggtaacgttttcgaattcctctcggacgtccgggggaacgcttggttctcatacccgatccgttcgaaagatgcgatggtcggatcatcgtttgttgtattaataccttgtgaggcactggcacgggcttgaattgagcatatggatctcgggatacggggtacgatcgatcgaacgaggacaggcggcagtttcgattggtgattcgagggcccggaacggtgaagcccctgcgcatattggccgacagccgcaaagtccggtcggaaagtatcgatatacttgcacacatcctcatcagctctgccccactcgctgatcggttccgattcagtcgatgacgcctcgtcaccatagtcggaactccgagctggacgcctcgacaagagttggctttcgagctcgatctttcctcgttcgagaggtcatcagacacgaacgaccacgatgtcacggggagagagttcagccgggttcgaccttgcccctcggtcggagcctaatccgaaatgtccgagtaaatgagagtgccgcccccgctttatttggcttggtctcagccttgcggtatgatactcgagccactgtatacaacgactgaaatacctgggacgactcggtcccgtgaatacaacctttctttgctctgctctcccttgttcccccctcccccccgcttcccccaagaagtggacgaacgggtcgacccgacgagccgaatcacggcgtagtcctagaaaaacttgacaccctcggcctcccccttgacgatctgggctttcccgcgcttgaccagcgtctctagcgatcgtcttagtaggacaggtgggagttgatggaactctgtacgtgagacgagccgagggagaaccggggcgtcagtcgggttgggatgggtcgaaaaaggacatggggtacgggttagatgccgagggtgacggggcagacggagcgggctaggtggcttaccggtcgtatgtgccatgtccccatcggtaatctcgtacaacgtcatgatcgatcccgccatcccgttctccgccacctgtatgacggtcggtataaacgagggcgggggggcaaggtccgtgtgagctcgcagcgtacgtatggtcacgaaatatacgaataggagagagaagagacaagcaacatggaagctcacccagtcgtagatcaaagctccccactcttcgggtttccgccagtagacgaggtacgtgtttggttgtttcggcgggtctggggagagcaggcctgtcatcgtcatggattcgcacccaggtcaatcagtgtcgatgcggtgacagaaaacgacgaggtagcgggacagaggcgatgcggaccttctttctccatcgaggtcacaagttgacgtatcgagctgggtaataatcggcctgaaggcgttgtttgcgttgcgatacccagccgaccatgagcttgaacccacgcctcgttggtctcacagcgaccaggaactcacgtccaatagacttgttttgcaagacctccctacagtcacctccatcggccgctccggcgtctatctggaagactttatggtgtttggcccatgatagcaataaccgcgtccagagcgtgagctgatgagcaaaggtttgtggatttggttgtaacctatccatatcgaaccgacagcggtatcaggaattgatctatcattgaatcacattgtaggacgtatacttgttactgacgtaaagaacggtggaaaggaccagatggcggggtaggtgaacccggtggacgaggtgtacggtcggagaggagtgttggagatggtccatcccggttgagtcttgtccgaagccgttgttcgtgtcgtgaccgatccgttcgtcgctgattccatggctatgttcggtaacctccacccgagtagctcgagtgagttttaaagtggttcgttgtgaatgtcgaggtgggtgggtgattgtagtagtggtagatgcgcatctatgatgacgagttgagtcgactaactagcatggccccccttcccagtcatcgacatcacgtgattcccgagtttcgacctggaccgaccgactagctcgactagggtggtaccgacctattcatctatctacctctcatcatcgcaacgactgtcagatagaccattcacgcattcatctcgattgtatcagcgcaaaccactctctaatcctttgcaaagatgtctcggccggaagacagggaccgaaatcaggaggccacggtctacctcgtaagtctcgctcagtcgtggatcgccgcgaggtatgccgattgacaccgttgcgttgctcatcgttgcgaattcttatttcgattcagggtaacctggatgaacgatgttcagacgcactgatttgggaactgatgctgtaagtgatacaatcgtaccgttccctccgccgtgcattccggctgaccactctggataacgttcacagacaagccggtcctgtcggcaagtcccgcccagaacgcccccctccacgcatgatcttcccgaacactaatatgctaacctcgatccgtaggcaacgtgcatctccccaaggacaggatctcacagacgcatcaagggttcggattctgcgagttcctgaccgaggaagacgccgagtacgcttgcaagattatgaaccagatcaaattgttcggaaagccaataagggtcaacaaggcgagtccttccggcccgcattcaccacccacagatttattgatcagcctgcttgatgtgacatgtctggtgtataggcctcgtatgacaagaaacagctggacgtgggagccaacttgtttatcggcaacttggacccgatggtggacgagaacgtcctgtacaatgccttttctgcgttcggccagctggctcagactgccaaggtgagtccccgcacgcgtggctcttcgagtctcgctcgcccgcccaatgaccggttcgtatatagactcacgatgattccatgtgctcctcggcagatcgcacgggacccccagacgggagaatccaagggatacgggttcatctcgtacaacgactttgacgcgtccgatgccgcgctcgaggcgttgaataatcagcacttgatgaacaagcccatcacggtgcaatacgctttcaaaaaggacggcaagggcgaacgacacgggacggccgcggagaggttgttggcggcacaggcaaagtgggttttatgaaccagcagagtcatgtcgacgtcgcaaggaaagctgaatcgactctgggtggttacaggaaaaactcgctcatcccgagtgcggcgcctccgatggctcaaggtcagggttatccgggaggttatcaaggtatgtcgtgatttgtggccattcttggtcgcttttcgtgccgccacggtctgactgtctgtccgcttcgatcccgatgacaggtcaattcgcggggacaatggcacctcaggtccctcctgcagggttcggcatgcaaaacaccgtcgtggctcctccacccatggggatgcccgtctaccaacccaaccctatgcagggccaattcggtgccatggccccaccaccaccacctcccatgggtttcccgcaaggaggtcttccaggtggaggaaccccgggtttccctccgcctccacccggtggaatgccagggtatccacctcagatgggcgtgcccccaatgggggcttatgggatgcaacagggaatgatgatgccaccaccaggacccccaccgttcatgaccggtgcgaacgctgcaccgttacagtaaacaacggcgggacgacgagcgacgtcccggctgtcaggggggctaggcgcgcattgtatatagatctcaccacgacatcgtcgtggcttgtaacccagagaaagcgaaaatttacggctacaagattcgctcgtaggcgagggtgttcggatatgctacaacagtctgtacctggttctgcacctcacgcatgaccacctgccatccttccccagttcgccaactcggtactcagcatctttcctccctctcccttgaagaaaccgatgatctcacttcgagtcaacagcgatcggcacatgatgaaccgctgcatgtgtggattggtattcggtctgaatcgcgtcgctggaaagatcagaccgatggagatgagatgttcccaagcctttacatagcgggaggatagacgtccatcagatgatgacctcgtggaaatctgccggtcctgctcaccgcctgcatcgtggatgcgctccacttggtccttccactcgcagcgagttctgtcctagcaaatcgattgtactcatgctccgccattgcaaagttgaactcttccttgccggcataggaaaagtgtttcgctatgatcaggatgaccaagtctggttgagatagtcctataaagcaaagcagaactcaattcggtgaaattccagccgatgcaaacggcggcctcaccatgcagctgctcgagtttcttgccccaaccggtggcctcggtctgatcctgtattcgcgcaacaacgctcgatgcggtgactgatagggttggattcgccaagtgatccgcgatcatctgcgcgaacggcctgcatagaagtctcgggtccgtcgtcaggctgcaaagccgcgagaccgccttttctaaactcgcctctgcgagtatagcctaccaagccggttcgtcagtcctatgaatgcggcgcccttatcggtacagaattacctggatcatggccttccaatcagctgaccagctcttttcgccttctgacatcgtcgaatcgacatcgccggacacctcgagcgcgtcctcgagtagactcttccacgccgagcctccatccagcgccaatggcgagaccacccggaatattcgctgcgagaaccgggacttgacccgcttctccagcagcaaaggtgtgtcctgcgaggtcgggtaaatgtgatgagcccaaagacccatgcgtctcggttgtgacgatgctcaccacccgactcgtcatgcctatcacggcgactcctcgaccagtgctatcgacgggtcctgtcctcacactttgcacgacgtccactacgagacggtctcgacgggtttcagcaccatcttcggcgagatatgtcactacagatgctcacataggcagtataacaaggcctgccgggcgtgctcggtaaacaggtcgaaaccctcgataaggacgatgatcgcacgcgccgatggcgtcgtcaaaaatgtcaaaaggtgtgaaggcagtgtcgtcggcgcagaagcctgcaagtgggttctggagctttagtaaaccgcagcaggtctcgactccgtgaccattccgtgctcttttaacgcacatcgacgaccaggctagtatcctcttcttcttccagctcgtcttgaccttcctgctgagcgatctgcctccccatctccctgatcgccagcatgtcgttcgtctgggcgagaccattcagacggacgatgataggggctctaggatttgattcggagctgccctgcgagactgtcttagcgatctggatggccctgttgacggtctaagattgggcagccttaattcttgcctatgaatgaagacgagaagatatcacattgaacccactcttgatttcccacttccctttgaaccgacgaccaggcaactattgccctccccccgctcaatagtgccgctgagcaaattgacgagcgaattcagcgcttcgttctccggcccctctgttcgaaacggagtggggttccaggaaggcggcgcagacaggttggacaagatcgcattgagtcgttcttgaacaaaaggaggaaccgcttgatcgatggtcgtcgaggcaaccgctggagactctagaggctcagcctggacgaaaaggtcttccgggattgtgtagtcgatctctacgccgaggtcgatctccataccatcatctggctctttgtcccccgctccggctgtccctatgtcttcgtcgtcgtctatcgagatttcgtcctcgggctcgaccatgacggccttgccgttcctcaactttctgccctcgttcgcatccccggtaaagacaaagttcctcgcccggttcagcttttgacgacgttcgttttccaaaaacttggctcgcgacaacttggagtcgagttcgaaagcatcgtcggattcttcggaatcgcccgatgaagaacctgggtcgtccgaggctggtccgatcggttcagctttgagtgtacgaggctttcgtgtggacttgggtgtcggctcgacttccccgtgcttcctcggtacagtctttttgcgtggcgtccgaggacctgacggattctccagatcaagtgcgtcgtcattcggacctccagcattgacctcttccagcgcagaagccgctttcaacgcttgcgcagctcttccccgaggtttagggacgcccggaacatccaccgtctttttcgcccgtttactaggattccgtttcaaggtcgaaacgctcgtcgagctctgttccagtgctgctgctgctgcttgctccccatcagattccgcctttcgtttccgaccggtcggtgtccttgtaggatttttcgagccatgcttacgactaggggttgtaggtccctcgggctgtgttctactctgtaccacaatgatctcggccgcctcgtcatcgtcgtcgtcgcctggttcgtgcaacgacaaggggtctggagaagccgtgctcggtctcgcggctaccatggttcgtagctgtctccacgggacgtagacgtatggcgatagcgggaagctagagttttcccggcaatattccttgcggtccgatccgatgagggtgacacccaacgatgtttgcttgttgtccagactagaaattcggtacatggacgacatgatatgatgatgatgaacctggtttggggtgtttgttgtttttgttaaagtcgatccatcgactcgcaagaaaagtggaggtcaacctggagaaatcaccgtcacaaggtcgtccaaggggctgatcatgatcccatgatggtctcatgtaatcgacgtcagcagcgttgtctagagtcccagacgccagccattaccatgacccggtaacgacgacgcgaatccgggatatcatgaatggactaccgaaaaagccgaatcagcctttgggtagtaaacctcaacggcccgagaccctagccaagtctcacctcgcgcactcttccattcgaggccagacggctcgacagaagcagaaagtgaaggaacagcaacgagccgaggcgggatcttcggacgatctggaaaagggacaagataatagtgtcactacggcacgaggaggcggaaaaaaggtcgtagcaggtgcaggaagcaagcctttcgtgaaagcggtcctcgccaaccctttagccccgcaatggtgagtgatcgaatcgtgctaccaccccgaaacccagcgttgactgatacacgtctacaacgttctaggcctgaaatacccctagaaggcgccagagacatcattcaaacgcttacaacgtcgttcccaggcgtggccgagttccatctcgcccgaggtcgcctcagctcgaaagagaaacaccgcgtcaacacggctttgaaaagggagaagagacagaaggagggtgtatcgtcgtcatcgaagtcgaaacgccacacgaaggacgcgatgagagggaagaagcgcaagctgacccccgagcccgagcagactgagcttgaaagagcacccaaacggccgagggttgaggcgaagggacgagaggagcaggagatcatcgaaattctggaaagtgacgaggaagaggcagtcgaagtgatgcacgagacacttcccaatggaagcgggaccgaagcgagaacgaaggaggaagcagaggacgaggaagaagaggaggaggaacaggtcgaggtgcgaccgtccgccatcgtcagccctggcgagcatctgcctgaacgagcactgccggtaagaccgcctcttatgggcagcctcttgtgcgggatcaacgaggtcttcaaaaagatggagagacagacggcaagtctagcgcaagaggtggagaacgtcctcaatgacggaaagacgggcgtgcatgctggcgaaggcgtctacagcctgtccgagctgatgtcaaatggcgcagaggactcgtcggccgtcgccccggaagccggctcctccaaggtggcagacatgcctgtcacgacggcattcacatcggcaatggcagctcctgcgcctgcacggatcgtctttgtctgcaagggggacatggaccccgttgacctgatcgagccgttgctcctgtacgcgacgagctggaacgcgctggtccggaactgtcgcacgcggttacaaacccggatgcgcgaggtcaagaaagaggggaagaaggatgaagggacggaagcgttctggcaagctgccgtcaaggcgttggtaaagacagaagaggtatatctggtaccactacctaagggagcggagatggatctggcagctgcgattgggttgagacgggttgccgtggtggctctgacggtaagtccggttgcagcgatatgtcactcttgtcataccgagttgaactcacccaatggtccatcatcagacgacattcccatgcgtaaagacgttcattgacaaactcaacgtgctcaaagttcgcccaccgctgccttctttccctatccaaccttacgaccctacagacccatcttcaatcccgatcggaccgaatttcgcatcggcccgcatgaaagcagtgcaaaccaccgttcccaaggacgccaaggcgaaaaagactcagcgtctggaagaggtcaaggccaagcggcgcgagcagaaacaggcgcaaaaggaccggaaagtcttgatgaagaagcaagggacgttgatcaatggcaagctgaggggagggacggacgcaaaggagagagagctagcggctctgaagaagcaggccacggacaagaacagcttgagacaaaagaagctcaagcagaagcaacgcgatcggcagcagatcggagcaaccgaacagccttccgacaccgcatctgttttgattcctgtacagccgcctcctagcgcagctacatctaccctgtgatgatttgtgacgacattattatacgtgacaagcgaacttttttgacgaattacttgtgatcgtcacgtcgttgaaggctttcgtgctcctggccgaacagcttcatcactctcgctggctcggtttgatatcctcgtagattttgccggggttgaacaggttgtcaggatcgaccgtacgtttgatggtatgcatcaggcgaacggtctcgggtccgagctccgacttgaggtattcctgtaggaccagacattgttcagcgaccgaaggtgcttgccttgcttgtgatggtggaaacttacgatctttccgagtcctactgaatgctctccggtacatgtgccgtccagggcgatggcattttccaccatagtatgcttcatggtaaagaagctgtcaatcccctgctgggcagccacacaaaacaaatcccgactcacgacagcctccttgatgtccttgagctcgtcttcgctctggaagacaaacaagctatgcacattgccatcgccctgatgtgcgacgacttagtttaacgattattctgtcagaagacttgactcgacttaccacatggccgaaatggcaagccgtcaaaccccgttttgctgcatcttcagatgtctccttcaccaattgaggcaatttcgagatggggacgctgggaaagcgagtactcagcatgtgcacatccttgagacacgtctcgatgctcaccacacatctgtagtccagactcgcccattgtctttgagcgcctgcacactccaaagagctgctttccttccttgccactgagcttccgcttcggcgtcatccttcgcaaactcgaatccgataccaccatgttttttggttatggtcttaagcgtctcggacatttcacccatcgagctttcggagctgtgtgaggatgcgcgtcaatcgcttgtagggtgtctgcagaaacgttgcgagcctcgctcacccctgtagcttgaaaaatagggtgtccttctcctcaaattgccttcctgccaggcctccctggttgattgccttcattgttagcgcatccagaaattcaatgcattctatcgtatttcagacgaaagcttagtctctggtcgagggcgttacgcgaaaatcgacgtacggatcggcaatcctgccgttgtgacctcggtcgctgcgcgcacagccgcttctacgccagtatcaaagctgaccacagccactctggtgggaagcaatggtgccaacttcaaggtagctgatggcggtgactgcgttagcctgatgggaacttttgctctcgacccgattctcaccttggagaatgatgcccaaagtcccctctgcgccgatgaacctgggcagatgagctcgtcagctgcgatcatcaagattgaagcagcaaatttccgacgaacatcttggtagtgtcccaacccgcactactctttctgctccgctgtcgcgtcttgataacatccccatttggtaacatcacagtctgcaacacctcacggttcagtattgcgtcttctcggcgagcgcatcgcaaaatgtgctcacggcgttcaagacccattcgccgcgcatggttccatatcgtacggcgttagtccccgaacaacccgtagacatcataccgccaatagtggcacctggaccgggatcgagctgtgacggtgacgacagggttatcagttgtcaagctccaactgatgcaccgtgtccacagggcgagacttactgggaagaaaagcggtatacccctcttcttgagctcggcattcaaatcctcccacttgacacccggttcgacgatgacatcgccatccgcctctaccccaggcgcagccggacatagagagttgtaaaattccgttcattggaaccgtggcacgcagttggccctcgttcagcggaccagacataccgtttatctgcagaatcttgtccattcgtgacatgtccaaggagatccctgcgtaaggctggatcatgtttggcgtctcatcgagtcaggtgccgcaccatatcacagatgtcaggcgggctgtgttgtactgacgctactgaaatgtccctcaagagaggtaccaccggaataaggtgtgatggggaccttgtactgtaacagaaattaacaggcaatcaaggtcagtttcgggtggtctcaattcccaagatgagaagtaaacagacttgccttgcgagaaatatctacgacgtccttgacatcttcaatgctggaatgtggcggtgcttatgagctcagctctgagactctgctgagcatgagacacggtaatgcactcacgtctctgcccatacaacgacgctcgcagggtgactgccgtgataactccaatcgttgatcccatgtgtccgcaagtcgtcctcgtcggtagaaacgtcgtccgccttgcccttcttctcgaaagcagctttcagggcgacgatcgcggcatcgtaggcctttttgctaccatgctgaggtctaaaagtacctggtcccgtcacggtctcatcgtcagggtcgagatcaagaggggtattcttgggcggtaccgaggagaacaggtggacgccttgggattcgagcaaggaggacaaggcataacccaacgctccggcgccaaagatggtcaagaacgagatggcgaaggattgggtcggtgagaatccagagtatcggaaacgaggggtcgtctgaaggtctggctttttgcgtgcgagttcagcggacagcctagtgccagagctcgatatcgaacgccgggactgggccgggatggtgcgagctgatggcagcaggcggatggaccgggggatcattctggtagccaatctaaagtcttgttattgattcgtacccgagaagattgcgaggtcctctaggtctgtatgatccttggggagtatgtcttcatgacagtgatatagaggtccaagtacaggatcaagacaaccaaagtcggagttcaagtatcaagttgcacattcctcttttgcatccgaaacaacccggatgtaaaattcggtcaaaggtatgatcggaagcaattggcgagctggttgggttgggagtcgtgatcggagcggtttcagctttggatcgtcaaaaacgtcttcccaacgatcgacgtcgatcgccaggcactttgtatcaggtgtttcatgtccggagtcatttcaatagtagtacctttgttgtcggcgctagtgtccatttcagtgagtgactgttgatcatccgccctggtcgcactcgatccgatcgtcatgttgagcagtaaatttctcgcacttgccggatcgtgcgccaacttaagacaagtgcacatggagtcaggttgaagacttttggctagttatcctcatcagatgataggaagaagttagacctttgcgtgatttctggtcttcagtcttagctaggcccttgagattcaagatgcgaaacaatcaacccgggatctgatctcgtttacttctcttttcgggggccactccggaccaacagcggcgagtgatgaattgacattacaacatatgtatcttcgccactcacttgccggcgtatgcacgaacggacttgttccgaatcgccatctctgtcgagatcgtcgatgatctgagcgctctaaggccaagtgcatagggactgctaactgctcatgatcatgctgtgcagccacaagtcttgtgtagttggttgtcttcacgcttggtaagcgattgggacgatatgggccttaagacttagttattcgtaccaaatgcgtcctcagggcgggctctccagacgcaatgaaacaaagtcttactgacatcgcactgcttacaactggcatgttatctttcgcatgaacacgcctgcaagaatatattttcgtgcctcaatgcatagtagctgtcgactgacgaatctagccatgagtgggatggctgacccgagcattacggaatccgaatgagtttcgcagccgctcctgcacatacatacaaccagtaccaccttctaggtacgacacctccttgccgacccccgcccaaagtggccaatcatttcgacattgacaagatgatcatgaagcgcgatcgcaggatctggtcagacatgtattggctcacaccaatgtactcctggtattgtctctgtctgcttcctcctactaactagcacgaccttgttgcgccttgtcgaccttggccgccgtcggcttgctccgctctcgcgcgccgctgctcgtccgaccaatcgacgacgacgatctaactttgcatgtacgcccgccctgatcgctagccgctcgatttccatcgtcgtcgccggcggttattgcctcgccttcgccgcttcttatcagcatggcgagtgaaacgcctcgtcggataaccccccgagaccatgcgtcccacagagaccggatctcacccgacgggcacccatcgcccggaatatttgggatctccagccgcccaactccttaggtcgacgtcgatggtctcgaatcacctcgttcgaccgagtcgcacccaccgatagaaagactcgacaataatggcgacccctcagatttgacctccaggttggaattaccatcaagcctgtaatcgtagagacatcgaagtaaccagcatgtcatcatcttcatcttcggcacctcgtcgggtcgtcattgtgggctcgggaatctttggaatttcgacggcacaatggatgttgaaaagaggaggatacgttgtgacgatcgttgacaagagcgatgttatccctgcccccgatgccgccagtacaggtgagaacagtgacagcgagagcgatggatcaggttggccgataggggtaactcatttgcctctgcactccgtgtgacgatgcagatatcaacaaggtgcggacttttgggtcgagtcgcgtgaggaagttctcaatgttgaccatcgtgactcgccatccgaaaacatagatccttcgtaatggtgactatgccgatccagacatggtgagtactcgatatccatatgcacctgtcggttccaagctcagacccgaacccgaccccgatctggtttgcaggccaagctcaactttgacgctatcgagatgtggaagagaccggaatggcagggcacattccacgaatccggggtgatcgtctcgggcaccgatggacatgcatcttgcggatacgtcgatagcagtttcgacaacgtgagcgtcctcaaagcggcccttgcgctttgtcaagtgaggaaacagtcgacttaccattctttgagcataccgcctgcaggtcaaatcgtgcgaccccggtgtcaggtgtctcgagggaaaaggtttccactcggcttaccctgaacacctggcttcgggatcaggatcgacctcttccatcctccctgaccgcctcgtccagctcgcccatcgcgtcacccactcgcgcaaaccctacttggcggatttccccaatcgacgggggtacgtgaaccctacgagtggatggggcgaagccacccgtgcgtgcgagattgtgctgaaagatatcaagaggatgggatgcaagatcttgccgggcaaagaagtcgtcgggatgacctttgtcgagcacgagtcgacccggggtggcaaacgcgtggtcgatggcgttaggttttcggatgggagcgagatcaaggccgacctcgtcgtcgtcgctgctggggcttggacaccggctttgttcgctcagcccatgatggggggtttaccggccgtcgtcgcggcggggcagtgtgtggccaagatccagttaaccccggaggaggtggaggaatacaaggacgtccccgtcgtgagtgatggagtcgtcctagacgtaaaagcacgagacgtgcgatgctgacctccaaaatcccccgttggcagaccctcgacttgacgaccgggttctactgcttccctcccaacccggacgggatcatgaagcttgccatccacgccgaaggctacttcaacacgtcgaaccctcccgaccccaagtcgaccaacgaaggttccgcacaatcgtccggcatctcggctccccgtacaatcctcactccgggaggcagcgaagggttcatccccaaacgccaggtgcagacattgaggcacgagtttagcaaggtctttccccggctggccgaggagaaggatttcatggggacgaggttgtgttggtataccgatacgccggattcaaactggttgatcgattggcatcccgagatgcaaggcttgctgctagccaccgccgggtgtggacacgctttcaaggtgagcaggttgcctgtcccacgtgacccctctatcgctctagtactgaattactgacgctcatgctcttatccctctagttcctgcccaacatcggtcgagagatcctcgctcgaatcgacggcacgctcgccccagagtacgcgcataaatggaggttcgaaggtcgagcctttgccgatcgggaccctgcgagtgacgccgacattcgaggaggcgggacggggaggaagaagttgatcatcgaggagctcgctacggagaaagacttgcgagcgaacgctttcgagttgaaggcggctttgtagacgggtagcacgacgggtgggagaggaatcggcagagtccggcaatataggaggatcaggctcggggacgtcctgctcaggttgtatcgatagaacaaaggtctgctatgcttataagctttttcgccggttcgtcgaaacgacatcaaccaagtctacggagtttccatccttggcggacggccgcttgaacgtgatcgtggatgacgaaccgactgggcgatcctgacgagatacgagcgggttcaaccggggcgatgacagcaatcatgttaacaagctgtttgtcctcacgctggtaaacatggaaagtcgtacgaccaccgcttcctcaaaccgcgctcgacggacaggggaatcgcgcaagttgacagacggaccatatacataatcacagcggaggccaatactcggctgagggtatacaacggtacaatgaaacggacggggacgtggctgtagcggaagttgtttttgtgcccaaaggtggtggcacggtcgttgatgcagagggacgtcgagggcgacggtgatagtctatggtggtgatggtacaggcgcggtgccctaccggggtaaagttgatagagaccgtgcgtgaaagcgagtggtacaggttgtggtgtcaagtcagacgaaaatttcgagggtggagtccaacccggtgtgacgagacggtcgagagttcagaggtgtgaaatagccaggagatgcccgatagagtaaacgccagggtctcggactggaggcgatggggcgagatgattgggatccctcggcttctggtgaaggtctaggtcctacgccgatctttaagacctgtgcgtctggcaagaggcagaagtacgaggttctacttcatatcgacgtcgtcgtcctcgtcctcgctttgagccttttcattgctaggcaagggcgcaccctcttcctctgaatcctgctcgtcatcctcctcctcgtcgtcgtcgtcatcatcgtcctgctgctcttcgacatgttcctgttcctccttgaccatctcctcggcttcgtcctccatcacgcccaacgcctcctccctggcttttctcaacctctccctctcctcctgctccagcctctcccgttccctctcgtgctcctcggcctcgctaggatccacagcgccgacctgaatcccgatgacatcggtgagtctctcgagctgagaagtctgtgtggatggtgcgtagtgcgctttggacgtctgtgcgatgaggaaggaggagaggaggtcgtacgtctcgttcggatcgaggtgtttgggcgtgccgtactggcgaataaaggtaggtggggggagcgatcgttccatcgtgtgcgtgaggggatcgaaagttgtagtattatctactagtagctagtggtgtgtggtagttgatggtaggtgtgacgggttgacctacttgtaattctttcaagtgggatgaaattggatgatgatctccgagggaagcacggtatttttgaaatagttacgtacgttaaaatgggggaattgttgttctgaccaagagaatgacacgtcatccatgatttatcccttgcacccttagctcggcccagcctaattccccactgttatcaaataaatcgacttgggtcagttcgtcgtggaccctcacatcccgagaaagggtcaattgtcgatatggaccaaggtcgataagcagccttgatcgtcattgtcacagcctacacaccacctacctaccataggaccgtatcgaactagctgttgataaatctcggcttcatcttcagaccgtcttacccgctcactgtctaattcgcggcccgacgaaaacgcgaacaacatggcaagtcgacaggctcgcgcaactacacgtggacccacactcatcctcatcctcatcctcatcctcatcctcatcctccctccctatctctgacttgctaccacagtcgacctcccaagcttacccccagttggacaacctctacccggctcctccttcgtcctcagagaacgggccgaacgcctcgtcttcttcttcctccaacagacccgctgcaggccccggcgccgggttcccctcgaaaccccctgctcccccttcctctgccggcttcggcaattacagctcggccggagggtatggaggtgcgggaccgtcctcctcgggtgtctatgggaccgctgggagagctcctggaccgggaagcgggagggggttgggcgacggtggggagaagaacgttgcccagttgatcgtcgacaggagcaacaagtttcaacgagcgtgagtacaaggattcggtcctttcgtcctgaatctggtcgttcggcggctgattgatgatcttgccccgacccgatggactcgatagataccagacgttgttggaccgttcgacaccgttgaccacgcagagatggctcgtcaccggcttcctctggttcctcttcgccttgatcgtcgtcatcgcccaaggagtaagcctcggtcgtcgcatcgtaatcgaggcacactaggtggacgagccgctgatctcctgtcgactcctctgcgcatctcagtggtacatcatttgctgtaagccttgcctctcgcccatccctctcacgcgccgctgcgtacacatttacatctacgatcgactgacccctctccgatcaaacattctacagacgccctggccatctacttgctcaacctctttttggcctttttgcaacccaagtttgacccttcgatacagcaggatctggctcaagacgatgtagaggaaggcgcgcccgggttgccaggtgcaggagggtcgggatcgtccaagggaggtaagtcgcgcgtgtttattcgtctgctttttccggttcgagatgacaacgtcggaacgagctgacctttcaatcccttccccattccctctccccttccgcctgacctaggtctcaaggggttgatgaacggtttctcttcgaacaacggcaacagcagcaacaacaacggggacgaagaggaattccgaccgttcatccgtcggttgcccgaattcaaattctggctctcggccaccaaggccaccctgctggcgttgttggcgacgacgacgagggcgacggatatccccgtctattggcccatcttgttggtctactttttcaccctctttgggttgaccatgaggaggcagattcagtgcgttttcacatgggcgtagcgagacgcaggtcatcgcagtgggcagacgaggcggtgaattgacggtccgatcgttcttcctttctaacacaggcatatgatcaagtaccggtacatcccctttgatctcggtaggaaggctacctatgggagcaagaagtaggcgagtagatagaggttgacaaacaaggcagaagagggagcaagtggcagaatcgaggtgtcgttgagaatcggagccgtcgttcaggtcgaggtcgtctagttgacaagggcggaagggagcggtgtacacgtgaacatctcccccggatttatagagaaggggatcccccttttttttgtttctcgcatgatatatcggaacatgatcgactgggctctcttctttgtctttcccattcgtttggctcgtcaacccgggttcttgctcgatgagccaggaatctcgagagcagatccatttcctggagcaagtcgagggcgagtagccaagtgaacgcacacgtcaggacgatggacggacgacgacgacgacgatgatcattcgagttggatctctttgttcaatctcgatcgagaagcatagacaatcgtcggcgaacgagttgggcaagaggacgaggaagcagtcgtagtatatatcactcatgtattctcgaggaatcatcgatcgttgaatgatgccgttccactcgacccggatcgcataacacacgtatcgccatagagagactgaaagacttcacaggcactcagaaaaaaaaacatgtccatagatctcaccggtaatctccctcgaacacctcccaagcgggcccagtcggtctttctctcgccttcttatgctacggggcccttgacgccagtgagtaaggtcgccgtgcatcccgactacagactcactcaaccttgcgactcctgctacagatcggaaccccagggaggtccaagtttggactcggagctcggtcagagatcgggacgacgcctgtgagtccagacagggcctcggtcgtcctggcccaaccgtccttctgattcgtacgatcccgctcatagacgtcgtcgaccgtcgccaaggtctcgggcttgttgggcccctctccctctccctctccctccccctcgccttctcctcgtcgagaggcttcagtcgtgagtcgtacttcccaacctctagtccatcttgcggacccactcacactctcgacactgtcacgaacctataggatatcaagccgacgcagaccgagctcaactatggatctcgagcgggctcggtcgcttcgtctatatccccgtccgagtcggccagccagatcggaaggtccccgttcacggtgtctaggtcgccgaggagcatacctttctacaagagagcgcaatccatcgccagggctccttcgaggccggcccctgagccgttgttctcgagtgccgacgacgacgacgaagacggcgtgacctgcctctcgccgtgagtgctattggttccgctggtctcgacacccacttcgtctcattactccactcatgtgtgtcgcagtggagacatcagcatggatgacgacgataccgccaccatcctccccgaaactggcgggaaacgattaccggccaactcgtcgccgtccaaatcgtcccgggcttcggcggtatcttcttcggcttcgaccgatatgccaaagttcaagcctcaccccttaggactcgagtctgttgaattgcagatgatcaacaatgaactgttgaactgcctgttctccaatccgtccaacagagaaggtttaagggagatctgcgatgaatatggattcaattcgccgttcgaattgaagaagctcatgtcggagactatccgccgcgccgccgattcgaacgacggcaaattcatgttgacgtcaatcgaagatccccgaaggtcttataagaaggtcatcaacacggccgacaatccgttttgtctcgattaagaagaaggacacccgtaccgtagagtgaataatataataatgaaatacgaacgaataaccctgacgctcaacccaagatctccttcatccgcttcaacaagacctcgacttcctcctcgcttccgacggtgattctcagacacccttcgcaacccttttccatccctcggaacctgacgacgacgccgagctcttcggcgagcttcttgtagaccatcttggcgcgttcgttggacgtctgaccctcctcgcttaggatctggacgagcacaaagttggcgtgattacccccgagcacattgccgatcgattggatctcgccagaagtcaatcgctggatcagctgatcccgattacgcaagagtcgagcggtgtgagagtcgaggagggagatgccagatggggtaaaggcggtgagtgcgagtgtggcggtcgggaccgatatattgtaaggcgccttggtgttggtcatgatctggaccaagggcggggaagcgagggcgaaaccgagtctgatgagaagcgtaacacgatcaaaagcggtcagccagatgttctcgaaccgagactcctctctgaagcgcctcatcgcaaactcaccggatcccagccaacccgaagcctttactcaaagtctgactgacacacacgttggcaaactctttgaccaaccccacggcggtatcctcgttgggtgacggggcgaaatcgatgtacgcctcgtcgacgacgacgatccccttgtagttgggattagacgcgatcctgcggacggtcgagagggggatgagggtgccggtagggttgccgggggagcacaggaagaggagcttggcgttgggttgctcgaggaaggtgcgctctagctgcaagtagtgagatgcaaggcgagacgggatcgtgagtttcggttcaattcgactcgatggggtttggcaagaggttgacgaccgccggacgacgactcacagcctcgatatcgacttcgaacttgccctcctcggtgatcagtggtacctcgatgacgcccacgtcgttgacgttcgcggtgaccccgtacatcccatacgtaggcggggtggtgatcacgacgtctttgccggggatacaactgacccggaagaggagatcgatgacctcgtccgatcctaccccgagaaagacccaattcggggaaggaacacctcggtgctcggcgatgagctttttaagcgggtcgtgcgtgggggatgggtaccggttgagagaggctagttgcgacgtcgtcatgctcatcaacgggttcgacgacgatgatggccccgaggaggaggatcccgggccagatccatcgatcttggacccagatccgttgacaccttgaatctcttcggcgaaactctcctctttacggatcggcatcgactcgccgtccttgccgcccgtaccctcctgatacgccctcaagagcgctgggaggacgggaccgagcgcgttctcgttggcatcaagtaggatacccgaatcgtagtcatccctcgctgatcggtaggggacaagagagaggatgttgggtcggatgatagattcgagggaaaagtgaggcgggtttgtcggggtgggttcgttctggggtacgccgaggatgggcatggttgtgcgtcggttctgtaggtggtccttgggttcaagcgagggtattacggatatcaggaatctaccagggttctatgtggtgattgctgtctatctacgaggtctttgagtgtctattttatatagtcatgtagttgcaggtatccatccattctcgataggatcaaaccgtacttttgcgcaagtttatgacttgggtcacccttagcttgacccgatcgatgactcgcggggcggcgcttctctcggcaaaagaggtcatctcattgcagtcaggtagaacagacaataataatgtcatagagacgactagacacgctgcgagaaaccaaagaagatctagaaacccgtgtgagatattgaggaacaatataagtgattgacggaatggcaataggaccatgtttcgaacctgatcagctctttttgacctagttgtaccatgacccccgccccgccccgatctaatcaactcgataacgcataaaattgacatctttcatctgcttttatgcgttttcgatggattccaccactcgacaacgtcaacatctcatcatccatcaccatcattcccctggactgctccatggtcaagctcatcatggactaatcggcgacgtccagccgtaactcgtggatgccagcactcgttacaacttgcaaaaacccaccgaacactttcgatactcgatcaaagaaggccaagtcgactctacaggacaaccagctcgagcaagttggagagacgctacacctttgagctagtcctttgtgatccgctggaccggccaaagccggagcttgttgtcgatcgtacacgtacatttcaagcaacgggaacgctctctggagacttcctgccgctggacgagctttaggtcgacgagacatcggaatcaccgtgctactgagaagacgagcgtcgaggcgttgacgacatttcgtcccggaacagtgagctccgcgtcgagccgatctggagcaggtttcgcattgcatcacggtcctgatcggcttccccttcctacttctctctctctctctctgaatcaaagttccgctctggaaaggtcagacgtggggaatatcaacgcagcctaggttattacgatttcgggcccccatatcgaacgatcccactagcactgtttgtcatacacccgtcccaggacacctgaaccacaagaaaaaaaaggctatcaccggccaacacacccaagctccgcgtggaacaaacaaaaccagacaatccaaaaggtctggaacgtagaaacatgtccgatcgacctcaatcgtcagcctcggtcggttcttcctcgagagacgctgcagctacggccgggaacgggacttcgggtgacaactccaggtaagatacaggctctggtcttgtcactctatcgacgtcgggcgatgttctgatcagctcgtgttatgtggtaaactgcacggcgcggtgtatagcgtggtgctcaaagtagggatggttggggatagtcaaatcgggaagacgagcttgatggtcaaatacgtcgaagggagtttcgagtgagtctgaacaagggcgggttcgcagacgactcggatgtacctatgctgatgacgcggatgctcgcttgcgatgatcagtgaggattatatccagacgctcggggtgaactttatggaaaagacgatcagtatacggagcaccgagattaccttttcggtgagcagaatcgacgttttctggcctttgagaccctagactcacgcgtcgctgcgtgatacttttctgcacggccggcgtgaccacgcagatatgggacctcggcggtcaacgagaattcgtctcgatgctgcccctcgtctcgaacgacgccgtggccatcctattcatgttcgacctgacacgaaagtcgacgttgaatagtatcaaagagtggtacaggcaggccaggggattcaacaaggtcagtgctgcccgttctcgcgacgtctttgtcgtctctgtaaaagagaggatgggctgatgatctcggtgtcctttcttggtagacggcgatccccgtcttgattgggaccaagtatgaccaatttgctacctttgcccgggatgaacaggacgaaatcacgcgacaggccaagaggttttccaaagccatgcatgcgccattggttagttcagcactcgaaacgccttgtttgtgcgatcaaggtcgactcgaagctgatacgagggacacgtttgggatcgaattctagatattttgttcgacgtcgcattcgatcaatgtgcaaaagattttcaaggtcggtcccattctctcgtcggcgggggtgtcaactatggagactcgaggatctgacttgatgttccttgttggatgcacacgcgcagattgtattggcaaaagcgttcgacctcaaggtaagtctcgttccgtcaacaaggacatttccctcgtcccgtttccccctgactgacctctctcgtcggccgtggtcagtgcaccgtacccgagatcgatggtccgggcgaaccgatcctcttatatctggacgtgtaacgaagctgacgataccactcgagggtggagggagggacgagttctttttttgacggtcagtcgcgcgcttttctgtcgatttgtccggcggattggtagtgagtggacgcgacagcatgagctgattaatggttgattctcgatcctcgataaatcttgaccgctgggcagatctttgtgcggaacgcgtgtcgccgcctttccatttttaacgagacgtagatgatcttgtacttgtgcacaagtctgaaacgatacatgacatttcctactatactcccggggcgcgtgtaaatggatggaggcacatgctgtagacgatgctcaatgcgtaaaaccagtgtgaagggatcgcatggccgatggaaacgaagttcttgtggtctgtgaccgggcgagattcagtaggtgtctagttggccatcgaggttgcgatcgtcttgagagctatcggatgtgccacgaccataagcgcatcgatctcgcgcaatgaccgagttggttgcaccaagaccggcgacgcgcccccggctcaaggtagtctttacttctctgacgccagaatcagaggcaaagctcaggaggagcctcgtattgcgctccctgtgggtgagactgttggcctttatacagtggtctggggcaaagtgagaacacaagtttcagaggaatcaaacttcgcgcgtttgagtcgcacatttttttactatattgtgtagtgcaaatctcgcaaacatcaattgccaccttagctcagttgggagagcgcacgactgaagtgaataagcttcgacttcgtgcggtcttgtgttcgatccacaaaggtggcagtgattatttttgccccggtcgatgatttttccgttttacggcgcaatccacctataactcttcatcgtcactcccacaacccccacaaccctcccgtcacttaccaaaaggcctgtggtcatcttcaaccagcaggctatcactgcttcgaccaggacctatgtcaccttttagcccggaatctgcgtttcgcgatcacgtgatacgcgttgaatcccgacacctaccggctctcaccccgtcgaccggtgcacatattgatcgacaccttgttgtttccctgacgatccggccatatgcagtatcaggcgcagtcactcgtatacctttagaatttccgcagtcatggatgcctcggtcgattcgcttccctactatgacaaggagctggagattccaggcgagtgacgtactcgcgaacacgcaaaactcgtcgctcggtatactaacctcgactcaacttgggctcgctcgcaggcctcaaagacctggtccagcaggaagtagcaaaggagatgaaaaggatgcaaaaggtgcaactggacgacgagaggattcctagggacatggaaccattcgtacgtcgagattcgcgaaccaaccagctgacgaggtgctcatccccttcgcacccgtcgtctgaccctcatcggccgccaccctgaagacctcgccccacctcaacgaactcctagctgcttatccctcgcaaacgctccaatcgagcaaggcgatcgacccgtccaagtggaaccccttgcgaccggatgagagcgaccctacggaagaatggcaacaggcggaacaaaaggcacggatcgggctgagcatgctgaatgacaggtgagtggatctccgtttcatattcggaaagggcctcgacgtcgagtcgatcgatgatcgctaacggttccccggccgtgcatcttcctctccctactcgcacctgataggaacgacaacctgtccctcttgagcgcgtacggcccgaacgcctggttgatccggaattaccagctcgaatcgcaagcgaaagaggtcgagatcgaggtcgagacgtggaaggaaaaggtcgtcgaggtgaacaggaagcggagggtctttcaggtcagttcccggggtaccgaggcacgacgtgtaaagggttcaattgctgatacgccgactgcacacgctgtactggacgatgacgttcctcccgtaggaatctacggggaaacatttgtcgacgttggaaaacaggtggcaagatctgatcaccgccacgatccagctcgagatggctagccgggcgatggagctcgaggtcgaggtgttgaagggtaaagaggccaggctcgaacaggaactcgagggcagggtatgaagagcgatgggagggtgacgtgatcatgtcatgacgtgcgagacgggacttgacggggtttggaggtggtcaaacgtgcaaagctcgtcctctagagcaggtcgcacgtgtcgttcaaaaggcaacctttgaactcggatcaaacacgtcggatccgatctaaccggcgaagagagggggacagcgtgggtgatttattgtgtctccgtgttccctgttgtatccacctagtaccaccagaaatacagttccagactaccgtatttgcacgagacggtatacggttcacggtgacctacccctctagctgctgttgctgctgctgctaaacctcctttgcgcgcgcgatcgtgatcgtcatcatcattcatgcattcatccatcccatcaccctcgttccgtttacgccgcctgtgatcctcctaatcccccggatcgaccgggaactacatccattctggtgcaagtcatcactcgtgagtgtgtgtgtgtcgtcgctgtcctaggtgtttcgtttgtccaaggcggttattgtggaacgtgggtgggcgacatgcattccaagtgggcaagtagagtcaagtcgaccttactcgcctctttgactcgcgcccctgccccttcacgtgcttttgcgaattcgcgaggaggcgacgggtgatgatccgatgatgatgatgaccatatttccatctggtatcaaccacactcgctataacttgtcatgacgatatcgcaatccatatcggccacatccatctagcacagtctcgcatcttgtcaataaacttcgctcgtgttcgttggtacacactcgtaccttcttcttctcaacgtcccgttgtctcgaacgaccggcgttaccaatcaccaacaactcgattctccctcgtcccggcgtacattaccagaccgacctaccacccctgatcgactcgaacctgcacctctgcccaataccactcgctaccatctaattccatcggttcatgacagatgtgcacgacgtgaaaacactcgttcgagaagatgacgggtatccgaacgagcggtcaggtcggaccggatcgaccatcatcaagtcgacctccaagtcgccagtcatgaccaccacgacccttccacagagacagactcgaccacgctgggctacggatgagtcgattcggtctgcaacttcgatgacatcgacgacatcctcttcctcgtcgagaagaccgacgggcgcgtccaggaattcccacgatgacctcgacctggaagctgctggacgggtggaagaccgagaaaaaatcccttacaagaggaatgggagtgaccgctctcagtcctatcgacggacgacgcaaggaacctcttccggatcgcctcgcagtggcccggaacggctcaagagggaaggctcgggaccgactaaattgacctcgggatccccgtctctgggctatcggaactcgtaccaacttcccgttccacgacgtaacctttcgatcccccatgaaccgtcttctccgagctcgacgtgcacctcgttatcgacctcgacctcgaccgcgttcgctcgggacaactcggttccgccacctacgcaaggcacgtcctactacaccccatacgatacgccatattcatcatatcgttacaccctctcgccacgtcaacgcaaggaattcccctttgacaagtttcgatacgacctccaggagcagtccccgcaccatacgccgctgtcaactcctttgacgttcaattcgccccggtccaaggccatgcgtttacaatcgaggtcgtataccggtcgacagcgggagcgaggggcgacgttgaccaaccccggcaacggcggtatgattggcgacgaaccggacgagtacgccgggtcgccttccccatcgccttatctacaacgacagccgctcccacttgcggctcaatccccgctccattcaccacgccgaacgccctcacggatgtcttccaaacagggcacaagtggacttggcttgggactcgaccgtgggttggaacacaacagttccgagcgggacttggcgtacatgcgtttcgtccccggtctcgggttgaggtcgggcgcgatgacgtttgaacaggacgattcggacgaggacgacgatatgcgtcgatatgcgggtgcggggcgggagagggtcggcacggacgacgacgaggatctaggacgggacgaagcaggtcagccagacacgcctggactgttgttacccggaaagagacccgcaaggactcgtggtcgatcgactcgacggatccgacccaggtctcactcgctcaccgacctgccatctgtcttcgattcgtcttatggtccatgggacgacgacgaaccgaaacagactgactcgatgctccagacgccttcagacgcactaaagttggaccccttgttcctgcctcatttctctctcgacacgaagttctccttgccccccgtggtcgctgcgaacggtggagaagcacctccccgaccgggacgtacgaattcgggcagggtggaacgcgaatacagtcgggatagcgttcgacccgctgcgcaggtaaaggcgggcgactcggacgaagaggtacatttcgacctcggtctcgggaaggacctggaccacacgatcgaggaagcggtcaagcgcgccaaggccgagatttcgggacatattaaaaaggtcgtcgtcaaggtcggagccgaggatgacgtcgagaccggtcaaggtggatccaaggggatgaaggaggagatgatgaagaccaaggaagtaccactcccgcccgaggctgcacgagtcttgagcgaggctagaaaacagcaacaacgggaactcttgctgagcgggcttcagagcggttcaaagggaggacgaaaggcgagcatggggatgggcttgttcaaggagagcgctcgggtcgagggggccgacgtacccgtcgggcgggaagggagggaaaaggaaagggtcgagagggaacgtgcggagcgcggcgagacgtcgaccgtatcgactcccgcagtcccgatcactccagcaaaagaccgtgaacgaggctggctgagcaggagctcgacgaccaagagcaaggtcatctccgaggctgcgagcgaagaggacgatgttgaccatcgagacctgcccaacttgtcccgtgcgctggacaatttggatcttcagaatctcgagctgggagcaaagagatcgcgcaaacatcagcgctccaagacggttcccgctgagccggtcgaagtattgcatgaaaagctagtcaagaacgcacaggacaagcccggcatcgcaccgcatcagaccaaatcgccgtatcgatcaagagcatcctcgcctcaatccagggaccggactacctcggcgccgacggttgtcggcattcaagcagtccgagagactcgctctcgcgtggcgtccccagccattagtcgagtacagtcccgagtccagccagtcacaaagacaccggcgatggacgattccgaatggcctcccgcggcggcggattaccctcacggctggaccagcgaggacacttgggagagcagctccggtttgagctcttctggtagtgaatctgaaggggatgacatctatgagagcgcggtcgaatccgatcactacagcgaaatgcgtcccggaagaaaacctcaggacgctcgaggtcgacctgcatcacccccctatacatctcgacgcagcccgtcatacatcaggcagagtcatctcgccaatgatcagttgaaacatgcgatcttgcccgagcacgatcgcagcgagatgaagtcgccaacgccccggatgcggcagcaaatcgaggacggtgaagacgatgcggtcgacgatattaggatcacggatggcgacggttcgcctggggaccgtatgaccgtaccgctccaacctttcaagaacaaggtcggagggcacagcgagatctacaaatttactcgccgagccgtgtgcaaggtgagtgatgatgcaagacgttttataacgaccgcgctgaccgcgatcacgtcacagccgctggtgtcgcgcgaaaacctgttctatgaagcggttgaacagatggctcccgcattgcttagctatatacctcggtacttgggtgtcatgctcgtcaattaccgcaaacctcagcaacccgcttctgaatccacacaggtgcctcccactggtcctaccgagtcttcaaatgggcttcagcgtcagggaatgaagcgtgcggcatcttttgcaggcacggatggacaggagctcaaagctgccgaaaacaaagaagtccccgaagtagcgctgatgtacaacaagcacgtcgtcccggattggctgttccgccggggtgggcggatttcgaagcccgatctcgaccggtataagacttggcaagcggcaggtgcagagacgactgaagacgagaccaacggaaacacgtcaaagagacggacgttcagaactcccgcaagctcaaccgactttccagactcattctcgccggatgctcggtccgacatttcgcacggtcaccaggcagtctacactccaccaccaccccctggttcgccattcccgcgacgtgcggagctgcatggatcgccatcgccctctttgtctgccacgcctcccctacatcacgccacctccacaccgacgctcccgcaataccgtcgcttgagcaatcagtcttcttcgacaccgataaatcagacccagcattgtccattattcggaggtacaggatcgaccgctgtcaacacaaagctcaaagaccacgtctttgcaaccattctgaggcgaatgcgaaaacaaggtcgagcggcgtcctactccttgaaccggaggctgcatcaggggcaagaagcaccgaccgatctcgaagacgcgtatgatacaacggatcaagaggatcatctgcctcccctgcactcggagagacgcgctcgcgaaatttgtggcacccagagcctgcgaggtcgagtcgaacgaaacgtcgcgggtagcatggatatgactccgattcacaagcctacagacggcgatgaagacgatccagacgatgaacattccgagccgcttcgacgggtcaatagcgaggtggtcatgagcgaattgaacagattagcgatcaccacccatgagcattcctcgcaaaagtcggatgtcaccaaatcgaagcgatccgcacgcgaagacagccttgatcgcggcatgttctcaatggatgatggtgaaagcggaaatccagagtctcctcggcgtgagtttcattgtccgggtgatctcgctgggcgctcactcacgacctttttttttctctgtgacagctacaagcgacgtcaacatggacgcgtcgaatcttagcgatgatgtgactcgccaagagtatttcattttcatggaagatctcactggaagattggtccatccgtgcgtgctcgacctgaagatgggcacgcggcaatacggttgtgacgcgacgcctttgaagaagaaaagtcaaaggaaaaagtgcgatcacacgaccagccgaccattgggcacgcggatctgcgggatgcaagtaagttgtgctctccagagtgcataagctagcgaaacctagtctcatttcttgtgctctttcaccgccaaaggtctgggacaatgtccgaaacgcgtttgtgtcgcaaaataaatacaaaggccgagaggtcaaagaagacgagtttacggacgtgctggaaagtttcctttatgatggctcgcgtcttttggcggaacacattccaggtctcatccacaaacttcaccgactcgcagcgattgtgtcccatctgcacggattccgcttctatggatgcagtctgctgttcgtctatgacggcgacaagcaggtccaggacaagtatctcgaagccaaaaaggctgcggcgaacggcgacgaggacgatgacgacaacgccacatttctagccgagcgcaaacatttacacgagcgcaagcaggaaaataagaagaacggtcctggtcgacggagccggagtgcagacgatcgacgggttggcaaccgggccgaggccattgaagcacatcgaaagcggggccagatccgcatccgaatcgtggactttgctcatcctacgacaggaagggactttgctcccatgacccctgacgaggacgtttctcatcttggtaaaggatacgacgcgcctcttgacccagtcaccggcaggcctcgggctagattcccaccgaagcatccgcgcgatccggatatgggcttcctctttggcctcaagagcatctgtgaagctctgaaagacatctatgaacacgaatgtgagcgaagaggcgacgcaccgcaacaccctcccgagggcgaagtcaagaaatcaaccgaacctcttccgcctctcctggcgtgtcccgacgaaaagatctttgagaaactattcccgaaggagtttgatataggctatctctcgatttagagtccgtgatgcgagaacattacggccgacccacttccctcttcgctttcccggaagcatcatcccaaggatgtttcgattgtttctctgttctagggccagtgtagctacaatactttttccacttctttggggtcatcatcggatacgggaatcgtaggtaaatcaattgtatttccttgcacgacaagaattcgtgccatgtagctatatccatcgaatgacatatcttggcttcttagagacacagctcaaggtttaattgtaacgcaaggcacccactctcggccgcttggctagaggtaaagcacaatcggcttacaaggcgtggccagtctcgaccaagactttccggtaagttacggctgtgagattagccaacaacacgccgtgaaaatgccatggtcaaacagccttggggtaggcgaggtctgctgcttccattaccatcacttaccttcagcaacatatcgatcgaagaaacgacgtttccaaggggatcagcgataagagaagatgcattcaccacggaggctgcatcagaaatggaaggcgattggtctggccgacgatagcgagattcaatcgcgcctttcatgtcgagtgattatctataaaatgtaataccgcgcatacaatccatggaacacggcgtcattactgaccgagcttttcgcgaattttctgatcaaccagccgttcgaccagcgccctcaatccacccggtccacccgcctgatcgtcctcgacatcgccctccaaactcctcagcacgtacttgcccacgcaatccacctcgatgttcacggtcccaccgacgtctttcgagctcaacgtgagcttttcctgtgaatgtgcgatcaacatgatcccgaactctcgtttcgatgacgagacgggcgagacgtgggtcaaggtgagggaagcgccgtcgatggtgatgtagcccttttcaatcaggtagggcatgaggtttggtgaggaagaggggaaggcgaatgtgtatcggatagaattgccgtcggattcccgggagacgatattggccgtggcatcgacgtgaccctacgattcgaggcggaaagcggacgagtgagcttttgcgccggggttgtaccggacatgaccgggcaggactcacctggaccatgtgtccaccgaaccgggtgtgggccgccatggctcgttcgacattgaccttgcctcctactttcaattgacctggaagggcaatcatggaccgttcagcatgcgacctccaatccctcaagatgtagtgggagcgtacccaagttggtacggttcaaagtctctggtgccaacccgaccttgaaggtgtccttgtcaaactctgtcactgtcagacaagctccgttcacgcagattgaatctccgatatggcagtcatcgagaataggagccgcatctttaaaggtaaaggtgaacccctcgaatgactcggccggggtgatgctcgagatggtaacgacgtgttcgacctgatgcggatcgggatgctttagctttggctggctgttgggccatccatcagcgactcacaagtcctgtgaacattttccgaaagatgatttgttgatagcctaaggggtaagaagaaacagggaatgtgagaacgatgtcgaaatcgaagctgatatgcaagcaacacttgaccaggactgaacgttgatcgtttccgatctaccgatgttactcgttaccaagcaccacgaggttcaaagttcaaggtggatttaccgatgagtcatcgcggccagtcaggtggaaataagctaagggggtctcacaggtggtaatattccccgcatgcgcggtggaaataagcatcaactcacgggttgagagcatcatcgtcttgggtgaacagtaacttgtacgtcagctaatcgtatttcaagatcaatcgtccttgtatgacaatcattacagatgcacaccataggtcataacatgatagctgttataacacagcccgagattacactcaagcaggactgcccgatcgcgtggccaggtggtatcgagcggcctacgatcgatcctgaacgagcgcaactcgactggattcgatcgagatacgaacagactgtataccttcccgaggtgagtcggcaagctcatttagcagaattgggataggtgactgacgaattgaaatcatgttattcatcgatcgcagcaattggctccccttgaacagctggcaagcgacttgcgcagaatgtcggctctcacacccgcatctgcttctgcatctacatcgacatcgacatccccctctgaagacccatcctcccccgtatcaccgtttctccttagaatttcagacatagaatccaaacaccgaaaacgcctgtccaagccgatcgagaactttctacgggacacggtgaaacacgtcgagcaggacactgagacgacgagccccggcctgctggacgggttcgaggatgaccaggagagacggacttgggtggaagggatgcgttaccgagctgattgcggtcagtcgaatacgatctcggaaggtcagacacaaggagacatcgacaggactacaaaacggatcatgaacgagcttgagaggagagagtaagtctggtccgggtcctgaaccgtggaatctcctcgttgctcataatctgttctgtctgcttggatcaatagggtgatggttcaaatcattctccttcttgtccattataatcttaaagaatctctccggctcgagaccccacaacaggaacccggtaaaaaggaccgcaagtctcgcaaaaagaaacgtgacaaggccgacccgcccgctctcgacccccttggagccctggatatcctgaccgaccgtctgacagtctggcaagctattggcgggacagaggtcccggtctatggggagaaagacgttcgaggatggatcaatgggaaggcgattttcaccggagcaggggaggaagactgggtcaagcggttctggaggatcgtcgtcaagccctttttcgggaatctcacgagtacgcaaaagtttgttcgagggatgcacaaaaaggttttcggagcggatgtgtccatcgaagaagacgtactacggacgaccatcgagacggaggttagcacgaagagatcgatgaagagggaaccatcggtcgtcgcgatcaatccacctggaacgttgaacggcaccgcgcatgcggcctttagccgatcttcaagcgttcaagcgatgcagcaagctcattcgagacgaagctcgatcgagtccaactctagtgtaagaatgctttcggccccgtctaaagacgccagccgagccggcagtatgggacccccagctgccggtcgaagggtctcgggtaatacgcctgatccacacggactcgatttggacgagggtgagctggatggaataggacgggctggaagcttgcgtcgttctacctcgagagtcaatagcggcgtcaacattttcaaaggccgggaggtcgggttcagtcgatcgacatcgctcaagccgactgacatgaacaacagccaggccggacctagcgcggctaccgtcctgagcgggtcgagtactgttggtggggctccgctcggaaggacttccagcgccatggcgggaatgaacgtcatcttgggcaagcgaaagaccatgattgtccccaaagacaagaccgccccttcaggttcgttcgtcaagcccagcgaccctgttcgtgctaccggtcctgggggattgcaaaagagcttttcgacgagtacgctcgccatggccactccctcgaaacccagatacgaatcgcgtttcacatcagaatctcagcctgtctcgttcgtccaggcacctgtgatgagcgcgttcgtcgctgagacaccaagcaatgccagcgcacggcgtcagacggctgaagatcgattcgccttgcacaagtctagctgggagaacacgaaacaggtcctcttcccctcggccgaccagggcgagccgagcagctcgatcaaaggggaagaccagcatggactcgcggattttatggaagacacagacgacgaggacgatgggactagtttcttcaccagtggaaaacgccgccgactggattcgagcgcaaaggagaacttgcgcaacgtcgtgctgttccgcaaccctgctggcgacccgaaacaggatcaatatgcgcagctcctgacagctacgaaacggttccgcccgaaatgcttgccggttctcggacagacgtttatgaaccagcgcgatttggcagatgtcatctccagcgagagtaataaatggtcggggatcatcgcaacaagcaagcgcgctggtgaagcctggcgagctgcttgccaccttgaaatacaaggtggacgtgccagcgaatccgattggtccgaagttccgttgtacacaccaggtcccgccaccggcgcatcttttgtagatgcgcacttgtcgacacgactcataccgcatcgcatcgaagcagcagaagaaacgggttcagcgattcccttgggtaatttcatcatcgaaaaccataaaaaattggccaagaaccccgaacgcccgctactcatccttgagggcgacaagaatggcccgaatcttacggacactctaggagatgctgtaacatatgcgcagcgagaaacgtatactactgggccgcgcgaagacttgggtccggatctcttgcacctatgccaaacgctttcggcggagtcgagctggaatcgtgacgtctggctagtctatttcgcgccttcatcagcaaaggcagtactggattgcttggagttgactgaatttgcgtcgggtctgccccgacaaggcagtccgcgagtcgaatccatgctacgatttcgcatcgcttccgttggcaataccacagcagcgtatctcaacgatcgcggactcgaggtcgaagcggttgcccgtcagccgacagcggaaggtatgcgggatgctctactcgaggccgattgagcgcgagtcgtatgctttatgatgattagccggtcgggctggttacgcggtaaacgacattatagcgtatgcgatacaatgacaaagtgacacgatccaaggaccagtcgcaacgtctatcatgagtcagaacccgaatccgatgcatgccatgagcggagatcagagtcgtcgtcttcgtcgtgccattcagtctgttcaacgacctctcgtaaattctgtctctggaattcccattcttcgcgatatcttgtccagagtgcaggttcagggaaccgcttgcttctccagggcttctgtgcccagtacagagtcctctccatcaaggacatctgctgcacgatatggatgggtcggatgccaatgacatgagatgcggcatcaacgatgattcgaagcggccgaggtagcttgatggcagccatgatcggcttgtcgactttcccggtgatgtaggtgcggattcgagatccgattggtaaatccgacaggccgctttcgggcatacttgcaaagtcgggtgaagtcggcggattgattttgttgctggtcttgctgaaatcggcccacgccttgatggccaggtcggtcatgtcgtgaggtctagcgagatccgcttgagggtagaggggaaacagatccgcaaggttcttggtgttcttcaagtctgtagcgtaatagacaaagcgagcctttaagacggagtctggtagaggtagcgagcgtcagccactcacgcgccggatagctcctgctcgagagcagaaattgctccgctctcgccaaaaagtcgtcgacgtcgatattttccgcccgggtaaaatcgctgtgatgaacccgtgcacgagtcaatattcgcagacggaatcgaggcaggagtgttgctcttgacctacatcggtacggtttccaggctaccaggcttgaaccatccggacttcaacttcctctctacctctgcgacccactctgcaccgaccggtagaccgatcgctggatcgtctgctgtcactggtaccctacagaacaacacgaggatgatcagcgccgaggactggccgcgaagtcgtcaccatagctcacctctcaaacccgtcaagaccgtagagcagcttgaaggcgatcaagacggctgcaactaagcgaagctcgatcgcgcccgatgttccatgtggccgcttaggtcctcgccagttcttgcccgtcttgatcgttgcttcaaccgcctgttcatccttggtgatctgtgacggctcagaggattctagtttggagttgtcattgacgggatccacgacgtcgggcgtagagtctcgactattcggggctgaggggcttccacgaggtcgcccgtcgtggtaccgttccggtcgtgatattgtgagggacatgtcgagaatctgcagaatctgataggccaccaggtagatgaccgctatgaatgcatcaacgtcagtggcgatttacttccagctgtccatggtgagaaaacttacgtcctccaccaagggtgctgactagtcgccaaagtacaggagctgcattcagctcggggattctgattcccttttcgaacgccagatcatcagctagaggcttcatacgttcccagaaaaagtagaccgagggagatcgctgagaccaagccaatatctcagcgggtgcgagctgtgcgatcaggtgactttccggctctcacctttgcccaagtcccgccggacagtagatcgcgactcatatgtggtttcatcgcgtctggaacgtaggtcgatctgccaaactctatataaggcaatgtcccatcgtccatcgcgctagagaagaattggggctatcgttcaggctccgtgacagtgtccgtccgcattgcgagacaattcgcttaccgcatgacatcaatcaacatgatggggatcctcatcatccacaggctcaggacgagaatgtgcacgaccgtctcggcggtgattcccttcatgtgagccccgctggaccacacgaggttcgaactctgcttgacaccgtaggcgaaacccgaggtggagatgaatcgccccttgttctccttgtccatcagatgtaccttcccgtttgtaaatgggatcttgacgatcccctcgatcgagaccgactgaagggaactcttgctagatactgactcgtccccggaaaaggcagataacctctcgaggaggtcggattcgatttccttttccgattccccatattcgtattcatccttgtccatgccatcgtcatcgtcgtcattccgctcgggtaacgcatattgatcgccctccgatatccgctctccctgatcgtccgcatcgtccgggtcatcactgtcgtcatcatcatcggtccatttgtcgtcttcaacctcgtcggtcaattcaccacgtccatcgtcgtccacttctctctcgtcatcggtagcatccatgtcgaaatccacctcgcttggtcgtcgaagcgtgacttttttctttttggcgtttttccgtccagcaggtcgacctcgttttttcgggagaggttcgcccatcaccaggtctggcgcgtctgaccctcgaggtctccgtggtttcgaatccctcttgcctagaggtctacccctcttcttctgttctccatgaggctgcgtcgactcggtcaggcccgtctcgctctgaggtgtcgaatgacctggcatccgcttgctgaccgttgcaagcggctgagaagctgatccagaggggtaagcggtttgcttttgtgcggccatggacatggtggttggaccgggaccggcttggccgtctcgctcttcatcgtcctcgactggcgggatgggtggttctggggtagagtacagctctagtgcgaggatccatagatctcgagcgatgatctgggtggcaccggtccttgcgataagccgacgatctcactgcaacgtgacgacttttcgacgtagcgaccgacctcgatctcctttgggactccccacgccgtctgtactgctgctagctgatgccgcagcatgagctggaacagctccagcctcaggtaatgttttgcctctccctcgaatactacacgcggaatgcgagtcgatcagcttgagacacccgccccgcatcgagctcgggacatgctgaccatcgggatctttctctccgacccctcgtcgtctctctttcggattggtctgcctcagacggcggcgatgcagctgatgctgaccgatctctgtcaagacggcctcttctgttcggaaaccctggtggagagcaacaaccagccatggcgggtcagggtcgggtgcagagcgatacgacgtctcgagctggagggtaactcacctggaggacatgaccctcttcgcaagtggctatcccgcccgactttctccacttgcgggaaccgcaaacgggacaagctctgggcatctcgtctctgtgtgtgttctatgtaatattcatggatgtgtgtggaagagcggtgtgggaaacttcaacggaacgatgtcgttgagcagcattgaccatatgtcaccatctcaacaagaccgagacgagaacaaattcgactattgactttgaatttaaagtttgtttacgatttcggtgattttctttttgactcgcaacaacaacgactcaacatcacctagctcgttgagactcacacaccaggtcatatcgacacgatcaatcgaggtcccagaacgctttggaacctgggaaacctttacgactcggaaccgcggccttgtgacccgtttccacctcccgacctacccgcttgggcgggcggccataggcggcacatacggcaagtattcacgaatggactcgctgctgatgaacctacccatgctcgagtcgatcaatgaggcctgtaaacagcctttgggaatgaccgtttacgacgcatagccatagagcgatcgtcgggatccactcgcaggcacgagatgcgttttgtgggggggggggggaatatgtgtatatatatgtgaatgtctgtcttgttcccgggaaaccgtcccggtcctttcccgaaatggacccccttttcccccgcgcttcgtatacacgaccaaacgtctacgtctcccctttttgcgaggacggcgagatcgttcgtcatccacagcaccgatcacccgtccatccctctcgtactcgtccttgtcgtctcgagtcgtccctcgacctcgcgctcgaggtgatcctttccactgtcgaccgctcaagccagctcttccaacttggcctcgtccttcttggcatcggcctcgtcgacctcttcaaagttctcgaccaagtcgggcacgtcatcgccctcgtcctcggcaccctcggcaccggcctcctttttctcagcagcctgtcgagcggtgaggttctggtaggattcggcgagtttgcggagagacgccaacgagtcgggtccgagctggttgaggataccggggacgagctcggtgaggtccttgtcctgaccgtttccgtagatggccatggtgttcgaggggaggtcggcgtggactatgggagcgaacaggagagggtcagcaggagtcgcatggcagaggatagacggcggggcgggcagatgggtcggggacgggcgaatctaggtcaagcgggcgtgggcgtaggcgtagggcgtgggtgccggtgtcggtgtcggcgtgatcaaggtgttgaccgtgatcaggttcgttcgtccacgagagaccattcacatcaccgcatcatcttcttcctttacccgctgcaccgacgggcatgtctttgggcaggacgaccatccagcccggatcgatgtcactccctcatccccaccgggctaaccggttcgcttccgtctttttgaacgtcctagtttcccgtgcagagagtgggtgggatgtcgtgatgatatgatgaccgtgcaacccgatcgatagcgagacccgttccattccctacatcgacccaacgcgccggacccgatccgatccgatcgtcgaccccaaccccgacctggacctggacttggacctgaactcaccggtaggtcggccgaaatgcaagacgttgccatcctccttgaacatgttgacctcctctactccggtgacgggctgaacgttcatctttttcaacgccgtctgcaatttcctgtcatccccagcggccgaggctcccgatttcttcacttgctttcgtcgcggagttccctttccacctgatcacgacacgacgatgatgacgaccaggtcgagggagattcgagtcggggggaggaggaaaggcaagcgatcagctctattatccgggccaggtgacctgtggtcgtgcgttgcacctaccgatcctggcggcttggagcttggcgagcttggtggggtcgaaagcgggggagctcattttggtatgtatgagagagagagggaagtagatctaagaggggggtagagggtagcgctgtaggctttgcacgatgatgatgttgatgtcgattgacctgggtgattgatgaatatgcgttggtgtgccagcatgggtggggtggggtggcccctaacccctaacccctaacgcatgccacacacaacaagccaaatattattactaccatcattgatcaagtctcgagtttctcctacttttggtttctcacctgtctcttagtggtcttgcacacgagtccccccttgctacatctctcgcatacctcgtcggcaactcgaccttcctcatggcgaacgcatctgcggtgtcattatggcatcagcgttgtcccgtactttcagtccctgatccggctggcaatcacttgaccctgagtcgtctgcaatgatcacaagctgtagtgtacatcgatggtcacagtcgttcgctcaaaatccgatgatacgatgatgtctggtccaatttcgaggtcgattggcgtcctgggcctcgttcggggctgtccgtgaggccgagatgaacagacaggcaaatcgaggactcgtcaaaacatctacgacgtttgctatggcatcttgtcatcgtttggagcttgaatcaagaaccacaactcaccagtgcgaaggcttgcagtctgcttcacgatatctcgggcgacgatctgctgctggaagcaccggtaacggccgcaagatacacactaagcggatctcatcacaacaccttatatgcgactgtagctcggcaagggatcatactatagaatacgctacttcaatagctatgctcggatcgtcaatcgtcaggaagttgctcgcatatgtaatacagcggggtcacccttggggatagttcaatcggatatgaatagcatgattaagttcataaacagggcggccaggaggaccgaaagtcggcaccgttggggacatgatatgatggaaatgacttgaaagctacgtagaaagacggtaagaagcattacacagctcgaacatcttcctggtcaaagagccatcttgatggcggacggtccgaacctccccattcccgactctccgtgcaagaattccaccggactttggtggtcctcgacataaccgaccccgccgaccgctttgtctgtggtccatacaccggtaatcagcgaggttattcataccctgccattcggcgatacgtacgatatccagcaatcttcagaatgtcgtcgggaagcctgcgagcgatctcgatcggggtcgacaagacctcttcttgatcctgacggaagtaatcacgttgtctgtcgtaccgtcaaaatcagcatccaaattcatctgacgctgatggaaaaaaatggacaacctacccgaagacggcgaacaaggttcgcaaggcgtctggatcattcggctcgcacttgttctctccggcaccgtgataagtcgctgcatggccaggatcagtgaccagactatgacgagatcgcaagaggttcgtgctatactcacaacccaaagtgaacaaggcagagccgcgttccatctcggcgtgagtacattcctcgaccttgggcgccctgtcgggactccacaggtggctaccgggaatgacggccgtggcctggcgagatggctcaaagtcagctggcgccaatccacaaacctgatcgactcgcacttacaccgttcttcttggtacacttggacccggcgatcaagcatccgaccatcggagtgaatagagggttcgaggcatcgggcctagtttggtaagcaatttggtcctgcaggcatcggcacagacgcaacgtcagcgacttcgcgagaggatcgacgtccgactgacttgccctgtgcaaaggctgaggtttcgcgcccggaacgaggcgaagtgcggcagtggaagccaacatgtagccgctcttttgcgggatgaggttgggtccagtgtaggaagcgtattcatcactgcgcatacagaacccgtcagatcagcaacacaccatgagtcgacaaatgatcaacctacttgaggaaacgttccataatgccttgccaaacggacaagcgcatgatcttcacgagttgctccgggatcttggcaagtagcgcctggaggggaaaagaatgatcagataccagctcttcgggagcgaacttccagaacgcatgagccactcacgtaaaccctgagcgagccctcggggaagaagtcttgtccaagttcattgtgggtagcattcgacttgtaggtagagcggccatggaagtaaggctcaactgtttcacaatgcgaagtcaaaacctcgtcctggtcgaggatcccgtcaaacggcccggtcaggcacttactggaagacatcgtttcattcagcagatcgggctgcagaaagttagagacgatgacaccgccgtctcgggcgatgatgtccaggatagcctgcaaaggctcgctcgcatcgatagtgaccaatgttggggacatctttgtttcgcgtgattaaaaggtttggtgagcttgacaatgaagatatttcgatagagatgtgcctacaaagagaccgctactttttacagctcttatctcgcatgtcatgtcataacatttatatctccacaagacctatcgatgcgatacgacccggaatccaaaccggagatcggactctagatgtcgattgctcggggtcttgatgtctcatcggactccagatccacggaccggagtccaaatcgggatcttatcgtgcatggcgggtaactgaccgcggccacatgaagactccaaccgccgactgcattgaacgagatacgcatcgtgtaacatccaagaagcatgtcgagtataagaagccaaggtgatggccactatcaacgacgagacagcaggtgatatgtgtcctggatgctcgaccacgcgaaacgcaaaaatggccgaacgaagtctcgatatcacaagcatgcctgacggcaagggagaggaagctcttaagactgtatgtgcgatcaccgggctagtccaccatcttcactgatactcggttatcacaggacgaccaggctgttgccgaggtctatccaccctctctcggaccaggtatcgagtcagcggaccatagcgcattggccgagtcgatcaaccatcgtcgattgaatgcgcggcaaatccaacttaccgcgatcgccggatctatcggagcgtgggtacaatgacaatgcacgcgtcctgattggtcggaccgtgctcatcttaattctcatcgtcttcacagcgccctctttgttgccatcggttctggagtccgttccggacctctttgcttgctgctgggtatgtaaccatggtttttactctgctttgccgcggacgctcaccggcagtttcctgcagcgttcctgttctgggcgactgtcgttttctctgtagcgcaatgccgtaagtgaactctaggtgcgctccgacctcagatcccgctggaaacgcgtttctctcttagagatggagatcgtcacgctctttccatacgatgggtctttcatcaggcttgctggccgtatggtggacccggcgctcggtgtcgctgttggctggaatcatttcgtagatatactctcgcctctcgcaaacgattgcagaatcgggaactcattccgtcccggtttcagtttgcgcaaacctcctacgtgattttcgaagccaccgtcatcaacactctagtcgaatattggggatacaatcagtcgcctgcgattctcattacagtctcgttgatcctctatctaggcatcaacgtttaccgtgcggatttgtttggagaggtcgagtgtgagtcgaccctcttgctatgtacctcctctatgcaagctgacggtgtgccaagcgactcagtctggctggctctcggcaaagtacttctcgctaccggattgattctctacactttcattaccatggtcgggggtaatcccctgcacgagtgagctgggcctaacccctgaagaggattgtccgctgaccaccagatccatcgggcagtgtctacgggtttcgatactggagagatcccggagtatgggctggagaagatgcctctggtagattagaatcattcatcaacgctgttaacgttggtgagcccgatcaaaggttcagacccggaggctccccgaactaaacaatccttgatcgttccagccggcttttgtatgggtggtccaggttagtagccttcgaaagttcgtccgtgcggccttaggctaatcgtgtttctccgacagaatatatcgtgggtatcgctagctgagaccgcgagaagattgaacttgcattctgatctcgtcacgttcgccaccttggctgatagtcaagtgaggatgttcctgcttatgtgccttgcggattcgtgactaatactttcgacaaccagtgattgccggagaagccaaagatccccgtcgtaccgtccccagagccttcagaacgatcatgacccgattgatcgtcttctttatcggtggcgcgatctgcgttggcgtgagtcggaacctttgcgcgaattggcagtacttctctgatccaggtattgatacagatcttggtaccttcgaacgacttgatgtatgtaactccgacctggaactctttgaaacggtcgttgaagtcagaaccaaaaacagactgactggaggaagtgacacgtatgctggaggatccccatagtgagtgcggatggaggagctataacaattgcgttcagaacatcggccaattctatctgcttcgcagcgttatttcgatgtagggaatcaccggacggggcttgcgagcagcaactctcaccaacaagaaccgctttgtcgcaggcaacgacttcagattccagtactgccctcggtcgtaacggctgccttgttgacaacaatcgtgtcagcaggcaacgcggtgagtttactggctgaggtaggcttactcatcattccagctcatcgcatcttctcactagtacaccttcaacgcttcacgaagcttacacgccctcgcactcgatggaaaggcccctcgcattctgagacgactgaacaagcagtaagtcggcctggcacgtggccgagtcgaccggacattgagatcgggaagcaacctgttttccagcggggttccgtatctggcagtcatcacagtgatgacgctgtcctgcctcgcctatctcgccttgggatccggcagcaaaaaggtcttgaattggattctcaagtgagctaaagaccgtatgaggaaaacttagatcggttgactcaacggatcgcgtcacagtttctgcacagcggctacaatgctgtaagccattctgcaagccttttcttggagtttctaggcttcggctgatcgctatcttgtgaacctgctaggaactggtgtgtcatggcgatcacctggattcgcttcaaccgagccatgcgcgtgcagggcatcgacagaaacgaatatcttccgacgccttcccgattccagccttacgccggctactgggctttgttctgggccagcatatttctttgggtgcaaggatacgctgttttcctcagcggcaactggaacagtaggtgttgtttccctaaagtcgttgctgcttaggcggtcgcttatccatgtgcctgggttcctgcatttcacctcagtcgccacctttatcttcaactacgggatcgtgagcgtcttacagagccgaattgctgatcattcttgagttaacgaatgggaccgatcacacagatcgctcttgccggaggtatcggactcgggttcaagattttcggcaagacgcctttccgccgcagcgtcgatgtggatctgaccacagacctagaattcttccaagagcttaacgatcactttcggaccgaagaagaagcaacgcccaagagactgcgggacaagatcatggccaaggtgttttaggtatctctaagcctaagggggttattttgcgtctttcacttgtttcaggatgttacgttggtctcgtttgtagtacgcctgtttctttcgagtgattcgtttgatcaatcccctgggttttccttgttctatcgttgtccgatgtagactgtgtccttgttgatgatatatgttgactgagctcactaacatatcacgaacatgagattttaaagatgagagcgtttgtacaccaaaagagggctaggagcaaatctctgacggggttgatgacggcgacagttgactgatttcggacatcggatcggccagatgccatacgctttccgctgtacgagagtcttgctatgtggacccgaatcaattgttaacctagattatacaactccgactcttctctccgccacgcggctgtccggaagactgtcacttgaggacatcgatacattccgccagtataagatacaaagaaagattgatacaacttccgaaatacacaaaaccaatggagcgtcaggcataattcactcgcgcacctggaccattcgaccgccatcttgcatcgtgatggcacgagcatcttcgatgacctcgccccgcctgttgacctcgaggattgcgttttccgccttggtcagtagcacgacggcgaggtaattcgtgaatgaatagagttgagtaatggcactacgcgaggattgacagataagcagcattcggtcgtcgcttatttaagtagacttaccgcacagcgcccataacaacaaacatgacgaggacaagactgcctataccgacggtaccaagctggccagtctgcatagtcgcagccctcgcttgagcagcgcgccgccgcccgcctaaggcacccatcgggagaccgaaaggtcctccgctgaagtgatcgacgattagtacaggtgagcttcgacgtaagagcaagatcgagcctgactcaggccacttacccacgcccgattctgacgttgttcgcgagctggaacggggccataaagcttgacgtgatcaacagcgtcgcgaatgacattgatccgataagggagaagccaagggagaaacgctcgagaatcggatgaagccaacccatgagacttccgagcttgaggatccctgccagcttggcgagcatcctgaagggcaagagggcatagtgaccggcagagtatacctcgaggtgctccgccgcatcgataaccatttgccacaccccctcgcccacttcctgcgcttcgccgttgatgaacgctcgcatacttcgtatcaccagctcgaacatgcctgaactgggctgcatgtaagtgaaccctccgggcaactcgattccgatgggaacgagaggatcgtgcctgacggctgcttcaaactcttcttgcgtatcttccatctgaaacgggatccatcgcgagatcctgttcttcttgggaatgagcttgaccatcctaggttgtctctccgtcggacccgcgacgagtcgtctgaatcggctaaaccgcatcagccaatgtaaggctgagccaaccgccagggtgagggccaagaacaagacgagcgaggtgatgagcaggatgatgggagacgatgcgaggccgaggaaacgggttctgcgcaggcggtagcggaatttgcattgagtgcattctgtggcagggtagacgcagcatctggtcagcctaggccatgcgcgagcccatccattcgatcctcctacccatgtatgctttctatagcgcaggcggatactgatcagctcatttccatcgcttcgcgagaagacctggatattcaccttattcctgcctttgccacgccactgttgcagacagctgactgtgagagcgaaacatgtatgacccgtttcagtcagctgttcaaacgatcgattccgggtgagaggcttactatgcacatgctgatcgatcgtgaatacgcgttcaagtgaccatcaaagggttatgcgaaaacggaagagcatgaatcagcaaaacccgagtcaaccgcacgaaagcgaccgtacactcacccgcatgcttcctctacacaagcaaggcgagatcaatctcccgagcccttggtctttctcctttcgctttcccgcatcgcgattctcgtcgtgattgtcgtcctcttcctcttcatcatcgtcatcatcgtcgtcaccagtaaaacagatcctgcatagcttttccccttccccatcggactcgagttctgcttcatctaccggcgactcgctcgacgttcccatcggcaggtgcatctcgtcgagtttcgtgctgttcgccgccgaatcaatctgttcgcttgtgaatagtaacggggacgaggctctactcgcccgtccgcctggcagcctatctgccaagcttgttgatctgggggtaccgggtcgagaccttggcaacgggagttgatcggacgagcctgctgctgcggttccacgagcatttggcctcgactgcctgtgagcgtccgaatcccgacgtctgctcgatgattccctcgctgaattgttatcttcgggaccggcgatgggcgtacgtcgacgtgaccaccatccccgacgagcattgtccgtcgatgtggtcgctgtagtccagccccatctgcctcttcctcgacccaagtcttcctgtttgggcaagccatcattacccgatacgaccgagagtcttgtcgttgatctggggtgctcttcgttagccaactgtcgatcaacctcatcctccgagtcttcctcttcgtccacgtcggccagcttgctagtccgaccctgcatctgcccttcgctcgtcgtaagggtggatgccgccggtatcatggtttcggatcgtacgactgttaccggccacttcttcggtatgttgagaccacccaccgggaccagactcggcgatgagatagtaggtcaatcgtcgttctcccctttcaattcgatcatcaacgtccatcatcagccgaacgttgccgacgcatcgggcccgggaatgtctcggatgcaattcgggagtataatcggaagtatatatccagattcgaaagcatatccatacctgctaatcatcgttaacctctgttggcgatgtcctcgagctgatgcgatacgaggaacggaccggtatgtgggtctatcgcaaggctgttgaatctgagcaagttatttcgtggagcgtgccccaaagtgtgtcgtgattcgcgacccgagacagaccgctcgagctgagcgattcgcagcgaaaatggctcactttaatcgctcaaaaccgacgaaccatcgcagggtttagcttggcggcagattctgggaagctatataagagataccaaagggctcgactctccccttccggatccctttcatggtagtccggaggcgccgaactcttaatgcgacacgacatcgatctctgcagtaacactcgacaaatcgcgatgtcgccaaaatgttgcaaggccgaatcggtccatcctggattgacgtccgacactgctgaagttgacccccagcttaccaaaacctccacaggggagcaagccgataattttgaggcgacattctgtgacactcaatcaccgccgaaactccagtgtcgacccataattggacctaaaacgcccaagagatcttgtgcagagcagaaggaaatcatctccgtgacggtttccaaacctggtcatgcgaggagcacaaatctccccacgccacatccggacgacggtcgatcatcgcaaatggccgattcgaaaaaggccgaatgctgtggccccaagatccagtcagaggttttaaatcttactaaaaatgacaaatgctcaagcaggggacctccagaagaacaaaagggaccggtatctgaaggatgttgcgggaagagaaatcctacgataccttctgtcgaccatatcaaggatcagcctgcctgggccactaacacagacacgcgcctcgagtcctgccgcacgggactggaagcctcttcgacttcgcctcgaattcccgctgcgacggatccgtcatgctgccccggatcacaacaacccagaatgagcgagcccacgttggaattcggcaagaaggcaggttgttgttcttcgacgaccgatccggccgcgcaggagcggaaagagaagagttgctgccgtggagacctacctttaagactggctccggccggagatgcaaccgagaccaaggtatcagtcgtgtctgtagtcgagggcgatggtaagtccaaatctcgacggttgttgaccgccgaagcaaagcagcgtgaccactaatgactcggtgcgatcagacaagatttgcccgtgctgcattggcctcgccatcaaaggtgagtcctctcccgaaaaggataagagacccgtctgatcccattcacgaacaatttgtgcagcgatgctagggaagccctcccagacttctttcacccatctgttggcgcaaagcacgtcggtcatccgtcggtgctgtcagctttttgacaaacattgctcgcagaaaacctgctgcatgcgtatgatgtccaaaaagttcaaggagaacggtctagagcatacagtggctgaaccggtgatcagaagcgcatccgtcaaagttggcacccagagctcaacaaacgaaaaggacggcttgctgagccgtgccgtattccgtctcgacggtatggactgcgcgtcctgctcgatcaaggtcacccgggcgacctcccgcctgacctcagttcaaagagtcaacgtagactactttgcctccaacatcacactcgaacacgacccagaacaggtcacgctcgatgcgatcgcccggttcgtctcgcgtgccaccgggttcaaggtgacgccattactggacccccatgagaacgcaagcggggtcgctaggctctcgctacccatcgccaccacttcgggaaccatcttgacccaggacgacacgaacaagtacacggtggtgtctagaggctcttacgccgaggtctgtttcgacccgcgtatccatccgccccgcagcgttatgcgagacttggaacgtttcggaccgaagctcataccacgagaaaaggcgaatgattgcgggataatcgcgcggagggctctgctcgagtccttcgtccgttccataacctgtacaatctgtgtcgtacctatcctggtcttgacatggggtaatccgaacccctcctttgccgccattcatgggacggccgccgggttatcaactgtcattctcggactctccacgccgcttctgataggctcaataaaatcgctcgtatatcttcaacatgcggatatccagctgctggtcgccgtgagcgtcctcacggcctatgtgttttcagtcgtggcattcgccctgaatctacggagaaacgatttcgaacatccctttttcgagacgccggcgctgctattgacgctggtgcacatgggtgccttggtacaggcatatgcgaggcgactcgtcggattagctgtggacgctctagagaccgctcagccagagagtgtgcgcgttctcaatccggcgcaggacgagaaagatgagactgcacgttggtcctccatcgatacgagattactggaatatggcgatattgttcgtgtcgagtcggatgagacgattgcggctgacggtttcgtgctgaaccacggctgcataatcgacgaatcctgcgtgacaggagagagcatgcctgtcgccaagcaaatcggcgaccttgtcgtcgccgggtgtacgaatgtcggtccaccttgtgacattcacgtcagtcgacttgttcacgagaacaccgccgccaagatggccgggcttgtcaaccaagtccaacagacgagactgccaatccaagatggagccgatcgtattgccgctgttttgttaccgtgcacactagcagtagcagccgtctccttgcttgtctggtctttggtagcccgctacgttcgggatcaatctggatcttcagctggagtttcgggcttgacatatgccatcgcggtcgtggctgtggcttgtccctgcgccctagtactggccgtgagtctcccattctgcaacagcgttcacgcccactgaccattgccatgactaccccaggctcccctggtgataaccaccgtcatctccatcggcttgcgtgctggtgtagtcttcagatccacctcggcactctggacgttccacgatgtggatacgttcgcattcgataagacgggaaccctgacggaaggtcgaatgacagtcgagaaacattacctaattgattctcaagcaggatcgctggtcgcagcattggtcgtgaaccagacgcacccaatctccaaggcggtcgcaagggctatcggagtggaccctgccacgatgagctttatcaagcaggccatgtccgaggtctccgtcgtgcccggccagggactagaaagcacttttgctggattccctttactcgggggaagtgcgacgttcgtcaggggcggatacgaggacgagaaaaatgacccgggcgacggcgcaacgagcgtctttatggtcacgctgggcggtcagatcatcgcatggtttcgtttgagcgatcgagaacgcttcgacgctcacgatctcgttcgaaccttgactcaggcgggtaagcgcgtcgtcataatcagcggagatctgcccgggcccgtcgatcgaatcgcagataagctcgaggtcttgccagaaaatacccatagtcaatgcagcccaactcagaagcttgagatcatccgtgagcttcagaaggataacaagaaggtgtgctacatcggggacggagcgaatgacgctccggcccttgccgctgcggacatcagcatcgctattggtgatggagctgggatcgctcaagcgacagccgacatcatcatcgtatcggatcgtcatctcaaggcatcgatcctgtccgctcttggtctcgcacgaatcaatcgatatcacgttctagcggcctttgcctggtcgatcttctacaacgttttcgccattctgctggcgtcgggagtctttgtgacggtgcggatcgctccgcagtgggctggtctcggggaactagcgagtatcctacccatcttcgtcatcgcctttagtacgaagctaagctagaagtggcgtagagaaggactcgccggttgacatgcggcatgggtgtgaagcatactcatcttgcatcaccgcgttacgtccgcacgccgtccaagtgggacttggagcaaggctgaagattatcctatactatactgccgatacaacagaaagtttgctaataacgtttgagaaagataacagggacgtttgggattgcatcgcacagcatctgagcttgaacattgacgatgatgtgcgagcgatcccggagaccaagcgggaatgatcgattctgcgtctcaatcgcgtgcatcagaattacatatcttatggatatcgttgatatgacgttgtctccatgcaagacatcgtgttcacagcaaatatcggtatcaatttcattttaaagccttactcgatcgttacttgcgccagcccgatctgactggcgtctcgaacagacaggctagattttaatgtctctaagcgcaggattgctgacggtcacaaacaaggcccccttgaaggtcgcttagcagtttgactcgtccgggaagagtgatttgccgatatctgaaatcatcatctatactttacgcaatcactagtcaacctttcccggccgccagtcaggaagtttcaagccggagcaatatctcatcgatggcagtgcccagttcatgtcttgtttacaccgtaccaaatcaaacccgccacggctccgctcaagacggagactggaggtggtaagtgataccactgcgccgctacaaaactcgcaccggcgacgacgccccaccatgggtcggcagtgagagcgccgctggccgtcgaggccatcgttccctcggccgacgtgtagatgtgcccgactgctcagcgtcatgacgttagcaagtgatccgagtagcgcgcggggttcccacatacctaaaaacaattgccatacggcggtatagatcaaaccgaccgcggcggcgttgagtccacgtagggcgcttttggcaatggcatattctctccacactttgtaaagcggcagtaaagctagtttaaggaggataccaggcgtaaagatgccgagatatcccaagaaggcgccgagtaccggattggacgggaccgcgagcacacccaggtaggccgcaaatgcaaagttgggtcctggaaaggcttgtagaatggcgaaaccgagcctgcaaggcgagtaatcgttggttaatccatagtcgactccacgtgtatgacatccgatcttacaagaaatcacgcgagttgacctgattccacgaagcagagcgtcaacccactggcattacgacgcacgtcagggctagaagcactcacccaaccgggatccaccgtgtatccgcgtagtagcggaatgacgacgggaccaccaccacaaatgatcgtcccagcgatcagcatgctatgaaatcgcgctaccagaatcagccaaacgtacgcgacctgaacggtaccgacttgttacttacttggtgaacaagctcaacgctctacctggtgatgtcaacgtgctcttgaggacaacaaacgtgatgaccaaagcgacgaacaagacaaagatggccgccgctgtcttgacattcaacgtatgaatctgctctttgacctcgacgggcttgtcctgcaggtcggccgtcgttgggaaagcttccctttgcttgtctccggtctgcctctgcctgacgccttgcctctcgacatccttcattggcaagagcgcggggctgtacttgccatccttgtgcttgacgggttcgggttgttccagttcggttgtcagtacaggccggatcgtatcctctgccccagagcccagctcgggcaactcaatacgttcgatcctgtccacctcttgttccggggaagacgagcgccgagaagagatcggaagagagtcgttaatgttgttgcctcgacgacgagcgggattcagctttttgaggatgatcgatcggaaatcccagaggacggtcgcgattccacctccgccgacaagcaccgggtacatctgcgtaagtgaagacctgcatcagtggttcgtccggttgacacactctcagttcccttggccgacacccacccacggtgcatgataacagatccccgccgaagccgtgacgagtaccaaacctcttgtcaaatggtccgtgatcgcgttcaggctcaactggtacgccgccagcgcgatcaaccctacagcggccgcgttgagtccggtcagggtggcgaggacgatatcggggagcacttcgggtagtcgggcgatacccgctgcgagacctgccatggcgatcgaagccggaagactgcgagagaggggtcgacggcacactcaccgcggtcagcttgttgctgtcttcctgacattgcgtccgctcctctgaaccgcctcgacgaccacactcacgaccacaagaaaaaggccaagaaccccgcggtcgttccattcctgacgagcgcgatcgagaatgccaactgagtcgatccgggccccggcaaggcgttccctagggcaaagaggtcagcgtaggtcttgtccgagatccatttgaggtcgttcacgaagactcgtctgcgatgcaagtcggaagtaacacagttctgtcagcgactctgaagctctgagacagtgggcttgtgttggcttgacgtggactgacttgaggatgacgacgtgaacgcctggacccccaaaagctatctcgcgcagggaccggacggcgtctcagtgactcagtaaagacctgcagccgcgatcgtcgactcacacgtaaatcctaggtaccagtagtgcctcagagtctctaccaacctggtctgtatgctcctaccgctcagatcgatcggttcgtcgtccatcgtggtcttcgatgtatctcgattccgtcgtgcggtgagggattcggccatgtccgacgtgatcgtcgttgctggcaagtctggtcccccaagtgatattgacaagatcctgatctagacgaccaagacgactcaaacaatcacgcaactacagaacaatgctagggcttccgtttcctatgacttggacatcgacgtcgatctgggttgtaattgacattcgaatatgcctcgattcttcgccaaagcacgtgctcgagtcgagagattgcgagattccgtgttggcttggcaagaaaacgattcgacatcaaaacgcataagatacgtcattatgcgttttgattgcatctttcaacgagatcaccttgacgtttcaccgcttcacatctggtcgctcgatcaggactactgtcagcacatcatcttgcgccatcgatccacatatacgagctgcatcgcaggcgtctatacgcgtcatcacgccgtatgaggtgatcgggatcatgaaaggaggaatgataacagtcacgagatcagaccaggggggcacggcgaccagggcgtccctcgccgtgcgatcctttgtagatatcaccagagtcgaactacgatggcatatataggtgtacgtctacttggtagtgacaggataatgtgtcctgaagcctcatgcctgagcggctctccttcccgttacattcgccaagttcccaacatgcccccccttcaacgttactataaagatgtccgtcggaagcgaagacacgcgctgtccaagggccatttcataggtttcgatcccgatgtcgacgcagatgccagggatcgtttccaggtccaagaagtccaaaagttcaagctgcgacatgcaccttcctcgcgtcgcggcgtcaccagtgttggtcttccaaccggaaagcgtttggagcacgtttgcgaagcgatcagggatgcatttctgttgacctttcagcgacatggagatcggctgttggagaaagttaagccagccgtagagagggcaagattgatggaccgacaagggcggaccgagcacacgttgttttacaatcgaagcctcgcaggtaacaccgcgaacagagcgggagaaatgatcgccgaagctctcgctccagagcgattctcgccttacgtcatcgacaaggcagtaggcgttcaatggttcctgcgagtcctcttgctgaccgagggcgaaccctacgatatcgttcaaatcgaatatggaatgatcgcggacatatcctggcatactcgctcggaaacttcccctcacaaccagatcaagcaaacgaagagatactgtggctcgtggctattcgattggaaccatgatgccgacttctcttcggaagaatactatactgaaggtaacactgcctcggaggggagttttccttccacgtggagtaatgcgggtcccctagagaagtctgtcattcgcttgacccgcccgatagaccagtttggaaaggctaggaaaaacaatctgcgcaacctgaagcgagcatggaaacaaaccaatcggacaggcagggttgcggattgggttgccgacaaactcagccaatcctccagctcgacacaagagagctttctggctaggaccttagacttgatcagctgtctgtcggacgaatatgctcagaatcaattcgacgacatcagctctgcaaagtcagtcgtctttcaagaacaagatgggacacttgtgtaccggcctgctcgaggcagagttagcaaggcgttgcatgctgctatagccgctgggtctcatgtgtatcactatcaccagtttgatcgtcatggcagaagaaggagagtgaaacagcccacggccaggaggtcgggacgcaaaattctccactggtcgggcagatccaagacggacgagaagagctcgggcagcgacacgggatcaattcttaccgtgagcaccgacgacgacggcaccgatcatcaaagccggcagcacgacgacaccgtcacaagtcaactcgaccgcagcggtgcttataacagtatttacactcctgcgacgagtcaggtgcgaactgcgagtgcacaacaccgccacgatgaggacgtcggtcaagattcggacagcgtcgagcagcaaatcaaagatatcgatcgacagatcgagattctaacaaatcagagtattctctcaccggaggctgatcgcagtgccctgatgacagagttaggaggaatggtggtggaaaggagggatctcatcagaaaaaaagtcaatctgctcatcaccagagcaggatattcctcacacatgtcgcaatacgaccccggcacattatattcagatggccagtcgaaactcacacaaccgctttcggaccgacattactcgtcggctcgatctgtcaccttcgcgccaagcggccgggaccgaatataaatactcggggctctcacaatgacattgaacggagagacttacataagtggaagatatgcagtttacgataacgcgagcgaccggttctggacctgagtagatcaaagatacaatgtcacgaacaaagagaatggtagcataagcatttcaacagctgcgtcaagcatttcatatcaacccgcttcctctagtcgcgattcgcttgatagtctgagctgatatcctgcagattgatcgtagtatctcaatgccatcggtttgcactgctttggtcgtgacgacgctgtacgacggctttggggaaaatgtgaccgaacggcttccgaacaacggacgtcttcgtcatatgcattcatgaaaagactttggtatggtggaactatctagcactcgacggtagccccctaccaatgcccgacgtgcctaggcctcggcttacagaggccggtagagcgggtacaggcgtgtctggcgggtcgaatgtgccgcctgctcgccctggtaatgactttcgaggtataagcgacttgaccggcgcagccccgttaccaggtgggtctgccaggcgttgtttgccgggttgccccagctgagccgaagtgcgtcggaccgaccgagtggttgggttgatattcgatgcgccgctaaattgaggttgtggtagaccagacggcatcgccctgactggtgaaggcgatcgcataagaccgcggttatagtcctggcgtgacgctggacgtggcagctgactgatcgaagcggtcgctgtgcgcgaacgtgtccccgctcgtgagctgggctgtaccgggaccctcgattcgagtccagacggtgtgggtggtcgggtcgaggagctcgacgtggtagacatgtgtgaagagagccgggatgatggccgttcgagcgcttgcgtttgtctgatcggggccgtcttgttgatcatcggcgacgggatcatcgggcgactcggcagtggtcccgtactcgtcgatgcgatcgtgtggtcacgctgcgtgctaccctcgtcgagaaatcggtccctaagggtctttccccggttcgtatgcgaggtcggactatcgttgtcttgctctagcgagtcacgttcttggacatggacccagctatcatttggactcccgctgatcattgtgaggtccgcttcctgatcttgctgctgcagcgccatgacggtgcgattcgatgaagacgaggcggtcgagacaattcggttaccgcgttgtgatcgattgaactggttggcgatggcatgcacgccgtgttgtgccatttgtgaaaagctggacttgcgcgagatcactcgtgctttcggttcgacgtagctgctcgccatgatggacgtgttggcggtgcgtacgctcgaggcggtgcttttggcaccgagtttgcccatcctcgttaacaattgcgacgtcttgctcgtcatgtcacgttgtcctgccaaggcgctactcgcgccggtgctctgtttccgagccgtcacggtcgacgtcacggtcgtgttcgagctagtgctcatgttgaggggtcgaagctgccggccgtacagactcgcccgtttgtcccgaccgacaaaaggcgacggagaaaagtccatctcctgtactcgcgtacgcgtcggagtctccggtccgacgaggtcagtgaggtgtctcgagttgatggatcggttgagaccgcgggcgggtccggcgtcgtgattagcgtgattagatctgggtgagggtgacatgttgctgagggtatggcttcgcctgattccaccgcctctcggtgaaccaggtgattcacgacctcggcctcgggatcggagactgtccacccgacctggacgcaggactggcaattgagagggtgtccctggcgagtcgtcggcgacggccgggcgcaaggtccgcatcgtcgaagatgacgacatggtcggtcggggtgactcttcgtacccctcggtgacgggcgacatgaaagccgagcgggataccggggctgtcgacggtggtgaaggcgtgatgagatggatcgcgctcgtcgaccgtcgcagtggtaagtctcggtcgttctgcgagatcttggcctctagctgttgtatcgtctggagggcctcttcgtgcgctctctgatgcttatccgctcgaccttccaggtaagtcatttcgtcgttttgctctgtcggtggtgcaccatcagccgtgctccggcgtcgttaatgcatcaagactcacctctcacgacatccttcaatctctgcacctcgtccaccaacgtcgtcttcatccgtagctcctcctctagcaacactttttcctctacgagccggttatatttgctctcaatatcgaggtaggacgagtgagcgttccggtgttccctctcgaggtcgtcgttgccctgttcgaggaggacgacggcgcgtttcgcgttatccctttccgaggtcaagttgtctatcgagagctgcagagcaagcggggttgattggatcagcccacgaggtggtgccggccgaccctcgacgctcacctgcatccctgccatcccttcattcaacgcgcgcatttcctcggcgtgtttccgtctgacctcttccctctcccacttgacgtcctcgagctgtctcgccaggctttcaatctcgtccccgagtgactggacgtgtgattcttgttcttgcgattgaagctggatcatctctgtcaccgagaccaggggaggagagcgtgatcaatccgggatcgtcccctgcctcatccgcctctatcgccaatgtcgtctcgtctcgctccgacgcgacgctgtgactcaccaacctccatcttggcctcttccagcatatccctgacctcgtcatacttgtctttccagtgatcgcgttcttgctcgatcgtgtcgaacgtcggcgtcctaggttcgggggacatgtcgtccctgttcggtgggcgtgttcgtatgtgcggggtcgtggttggggttggggtgaagggtgggaggtgatggtcaacgagttgatcgtggtcgagccgtcacgacgagcgagtcatccacgagccggtcgtcgatatcgccagcatggaaggcgaaagtttgtcgggatccatcatgaacggggcgaggaagatatccagagaaagggtacgtaaaggtcgatagttccgaatcggggtgcgatcagggtgaggacatgcccgaatcgatcacgccggcgttgttgcgacatccgtgatgatcatcacgacgtgaatgtaatcagagtaagtccggatccaatggggtatgatatcacgaaagatgtcgacgagattatgtaagggttgagttgacggtcaagaggtagatggattgaatatgatcagctctcaacctcgaaaacacgccttagctggtgggacagccgttcagccaactaacgtcccgttgtcgccgtccatgtcgtcgatccgaatgactaagtttcctgtgatccgaaaatacagctactgtcgtgatgatcgtgctaagaccgcccttttggtgcctcccgagtatcgagtctcaaggtcgtggtcgtgggcgtagtcacgatgatacctcccacgtaacctttcagagctcccgacctcgttccagacgatcacgtcgctcctcttctcgacctccgcagctagtccgagtttgtcgactactctgatctctgtgcagaccgagtgcggtcgtgatgtgacgtaaacgcacgacccgtggccatgtcgatgatagatgaatgactaccccaagtttgattgcttgtgaataatatgctctactcttgaaattacttccgatcggaatcaaattcacgggagcggggttaggttagggttcatcaaaacaaccggggccgtacgtcgtcgtcacaagtaatgcaagttatgcaggtgattccagacgggatttcaaggacggcggtgaggtcgaggcgatcttaggaacgtcacgggaattctcctgaggaggtcactgccaagtcgattgcagatggtgggccgaggaatcgtcgtgctcgacctgtgtatgcgtgcgagtcgagatgtcatcccggcgctggatgatttcgagcggtatgatacccggaagagcagtacgagtgtgatcgactgacatgtttcaaccaaaatgtgcaactactgggattatcgccgtattctatcaggtgaactgtacaagtattgaaaggcctgtcgaatgttgtcaagagtacaacaagtcgggccgctttcgattcacacatcagatcatcagttgcaacccaccctccctcacttgcgggggcatctagcgagaagattgacaggtatcgctattcatcgagcttgtcattcaaggcggtcgatagcgacggtggtacactattacgggcttatcctcggaataacccgacaagataacagccaagggtcgttcatggtattcgttgccctgctgatcggcaatgcgccaaacagccacagccacagccgacacggccggataacccttgacctggcttttactctacctctagcctagccgacctcgacctttaatcgacgcccctcaacgagcaccttggctttgatcgtcgcgacaagcagcctgtggcatgtgtccagggtcgggggatcacgaggttgtcgatttgtcgcgattgtcgcgatgatagcagcaggtgtcgttcgttcgactcgatccttggatcctcggcgttcgaacgacctgattcatttgatcaccagcgactgtagcacctgcacctgatccctgtactagccatgcatcaggtgactgtgcaccaccaccatacacatcatatcatacccccaactcgactcatgatcatatcctcgagatcgtcgtttatcgttccaattttgcttccgcgcgtttcgacctcgggaccttgccagcgacgacgacgacgtgactcaaagaccgaggccaccagcgaccagccaaccactatctacctacttctctacttacctaccctctccctgtctcttccctttcatcctgtacaagcaagctgggtcaaaggaacgtacactcgggtgtcagcaacgatcacctcgccatacctcacgctcggtcctatcaccatcagctcctccccccctcccgtgtcgatcgatcaagccgacgacgtgtttgcatcaaacaccatttcctctttcatcatcccaattcgaccatcgacaagcaacctgatcgacctcatcgacccccgctgaccatgtccgactccacaccggatgtcgaccccgtcttgaccccgtcgacaccgaaacccctctcgtccaccaccctacccacgtctccttccccacgtcgaatccccccgacggtcggtccacccggattatcatcccccgggacacccggtcgatcggcccctgcgatagttccaccggggatctccctctctagacctatgaccaccacggcgacgacgaccacctctagtagtaataccaccaacaccggtgtgacgcctaccaaaccccgcgtccccaagaaacccggttccaacccccaccccagttccacttccaatcccaagaaacccacgggatcgacccctaatcctagcggggctgccgggatggatgaccctgaatcccgggacccgacgagacagggcaaggggaaagatctctctcatgtgccttgtcggttctacaagatgggcatgtgtgcggcgggggatgggtgtgttttcagtcataccgtcgtcgatagtaagttcagggctcgcggtcaggtcgagtgggggggtggggggtggaatgctgatcgcttcgacttgatcccatgtttctttgatttcacattgtaacccgtattataacacctcgtcctggtcatccaccatcattccgtcccacttgcaccgacgacgacgacgacgacggccgtttaacgtgccctatcgcacgtcattcttcggacccgatacatgattctcgccctcgatccgccccgatacagccgggaacaccaaacaggtctgccagtggttcttgaaaggaaactgccgattcggacacaagtgtgagtctcgccggctgatgccaatggtgcacgggggtcgaggagaggagacggaatgagggagagaccagcgcgactgacgtccacaccatactctactgcaggcgccctggcccacctctacccgaacgaaccgccgaccatggaccgcaagcacaaaaaggccgcccagctcgcggccaacggggtaccgcaggacgagatcgagtcggtcgtctacggtggaacgtcgtacatcttgcctgccggtgggtatcaacaggacgatctcgaacgtgccgaagacgacggcgaggtcgagggcgggatggcgatccccaaagacaagtcgggttccgatgccgccgccgctggagccaacgggggaaagatgagctactctcaatccttgaaatcgccttccaacgggaaatccggtagcaagcccggtgaagggtcgctcgaggccaatatgaacaacccggccgctcgagccagacgcggttcctcctcgctcgaccggaccggagccgtgcccatcaaatcgatcaagtcgcaagcccaacgacaggacgccgcgggtcattcgatcgggtccatctcaccggcgaatcgacatcaggccgccttgctctccacattgaaccggcccgggtcggcgaccgctcaggctcagtcgccatcgaccccgccgacggcaatggggtacaataccatgtcctcgtccatcccccgatcgcaaggtgggacctcgttcatggcccggggtccgggggacgaatccgaaaacttcaaatctcgacccgtacccctcagcgtcccgggacctctccccatgtccgctcgatccggatcgttcgtacaggacccgatcgggactccacccagggaatccgggtcgttcatcctaggacgcagtttcggggccggtggatcgggtaacgcgctcacggctcccctgatgaaccgaggcggttcgttctcctcgaccgacgccgtcaacatgcgaccgggactcaagaccaccgggttctcggacccaaacgtcaacatgcctccagggtccgtccccgggtccaaattctcctcgtccgtcctcggcgccgagtttaatcagatgggtagggatatctggggacaacgtacctcgctggcacccgtcccttcgcgtacgcattcgacgcagtctcaatcgggtatgaccaggcccatcctggacgtctcgaacaggcgagagagcgaagttttcctcctcgacgacggggacgatgcggatgtcgacgctgctgaagagttcttgcctggtagtctgaccgaactgttgaaccctagggaacgggcgcgacgattgagtcggagggagagtgggagtgcaccgggcgtcacgtctgggtcggtcgggatcagggcaggatgggtctcgtcgtccggaggcggtggcgatgcgaccaatctcggcgggttgggaagcaccgggtcgagctgggattcgaggcccaacatggacgcgctcctacatcgacaagccatgtccgctggagccgtcgacggagggttcttgcgtagcctatgggacgacgccggcgaggatgccaggcgcaaggttcgtcagcaggacctcgaggctccccctgcgagcgcagcggctgctgtaggcggactgtccagcatgtttgccggtgcaggcggatcgaacgaagggagcctgaccgcaccgcccgataccggattccaactcggaccgagcaactcgtcggtcgcctttttgccaacgttcactgcccatcgacaggccatcctcggtgaccacggctcacctgtcagccggggcaacctgcactcgccctcccgaccatcgcctctgcatcgggatagcaccaaccaagccatctcgtcctccaacgtccccgtcaaggatggtctcgaggtccagcacgcacatctcgccccgcaacatttgcgtcccttggtctcgcctggaactcgcgccctcgaagctcacgcgcccggtcagagtttgcctcagggtctcgccgcaggcttgtcccgtatgcatttgcgtccatcgacatctcgtcagacgagtggtctcaacactggcggtttggtcggcggcgaagcgctcagcccgagcggaagcagcatcggagtcgctggaccccaggcgatcggtcgatacgagactctccgtcgacaagaatcgcgagaaaagcccgtcgtcacggtcggcgagggagaagatgacgatctgtttgaaatggaggggtagagtttgccagaacgaatgatctagtattaagtcggaaaccatcgtctcaacctcacgtcacctaagtggaggcaactgtatatatacatctccctatttcaagtggccatctatcgggtaatctctcgacttattttgaagcctgtcgaagcgactcgatctctgccgacttcaactcgagatctaccagctcccatccgctgatgcctagatcccccctataccggggttttgccagtggcgaagaagtcgtccagattctccaacgtaaagatctcgccttctggtctacgtcgcgatattctgttgcgcagacgccgaccgataccatcttttgcctgagtacgggacaagtctctcggagcgcttgccgcttgaccaggcttcgcgtgttgttcagccttgttgacgaagaatcgctggcaccggaaaagatgtcagcgagatttcaggctctacatcgacacggcgcaccgacctttttacgccatgtggaagctttgggttggccaggacgttgttcagagaacgcttcgtctggaccaatcgattctgtgctatcatctaggtcccggccagcattgctgaagctcgctttctgagacgccacatcgtccgaataactatcgattgataccttgtcgatgaggggaagaagtaaagtctgtcagttccggtccgggggtccgtacgactcgtgtgttagagatcctccaaactcacctttctaggggctcgtctatggttggcaatcatataatttgtctcattctcagagaggttgaaagaatagtcggtgtttggagcagtaaagtctagtccggcgtcagaagtgatcgtttgctgtaacgggccgaacaagctcggtccgatcctctgatcaccgtcaaacgcgagaagggttgaaaagtcttcgacatcgtcggctgtcagcgtcaagttctgatcacagatcacacccagtactcacctactatcaaggatcctgggtcagaatcgaccgtgtcgtctctggtctgtggatcggaaaggagcgataggttgttggtgagccaagtgtcagctagtagttcaaattccggtagtgtggtgttgggcaatgggtggagaaaggcataacgtactggtcgatctggcgacagaaacggtttactacgatcggcaatcattcgttcgttgccgtgtgcagatgtagcctgctcctccagcggagaaatcgaatgaccgctgtggccgttaaaatacggttgtagactgttcacagactgggtacactccacgatgagcatcacaacaagggaaattcttaagtgatcccgtctcacctgatcatgatctgaatatccgggcttggaagattccggcgagacagcgcgtctggaagtctgatgacctgggccatcccaggtagccgggtaaccgcggtttaggggactaacgttaccagagtcgtaggactgtatatatgttcccagccagattatggaccgcttgtatttcgttaacttgcgcctcaatatcgatccggcgcaaactcacgccgatgcttcttctcttcaaagaaaggatttcgctagcggcgtcatcgaaactaaaccttgatccggatgcgttggatgtgttggatgcgttggatgcgttggatgcgttggattgcagttcatccgccggatagccgtacatcttgctctcaagatcgtctgcagactcacgttcggatagtccaacacgcaatcattggaccactacggaatttgactggggctggatcgacgatcatatactgctggagacacaggtcaaacgttaccgacaaatcctgagtttcaagggcgtactgagccaaaatctgtccccgtgttttaggtgaaaatgtaaagggataaatctcgggtctgaagcaatctgtccgacgtgtgtagcgtatcgtgtcctttcagctcgacaaaggaggatgccggaggagttcagactattactttgtgacgtaggctccgagagatcaccgccgatatgcagcaaaatctagctctaaaccgactagtgaagtatttcgacgcagatacacagctacacaggtcattgcgctatttgccactgtcggttcgtttcagtagaccccgtcacggaaaactaatgatcgtcaagcggccaagcggggattgagggaacatcacactcttcctcacgcgccccaacgtggatatgtgtatttcgcgcggaagccacaacactttgtctgacaggttcgcagtcaatcggttcggctcaagactttgcagtaaagccgccgccgctccttccattgatgactaagatggacatgtatcgttccgagatcgatccgattcagcgtgattttcttatggatcggtccgctgctcagccgtggatcttgtcgtctcattcagggacgatgtcgtcagtctttggtctgacacagccccttcctgactgggatcctgcgataaacaacgtcggtcagattgactgccagcgactgatatggctggaagtgatcggtctctcaccttctcgtcgacttactcggtacatctcgcatcgagttgaagcagggatatctcctgcggagcggctgacttcgccgaggctgttgaggtccccacattatgtctataagacctactgctgctggaaccttcgggtggactttcgtgcaaaaaacttgagacaacgtcgaacccatgatcaattcttcacactacagtacgacaagttatacataagaggagcgagaaagcatgtcgccaccacgagtgatcgaaccgtctccgacagagaacaaaggaatgtctcgagcgtggcgtgatagaccacgaggggaacaacttgtacgcaatccctcctccaaacacccaacagcatgtcagagatgacggaagccggctttttacccgtgaagacaccgagtcgacgcgaaccaggatcttcatgacttcttgtcgctgtctttgcggccgaaggtattcatactcctagttatacgcttgattgaccctcttagagatctttcctcggcatcccggctcagatccttcggcaggtccagcgaatcgtacgtgaacgttcgcttactaggcttcggcattacagcgtcctcttggctttgacaggctaacatgtccatagagcctgaattggcggagaaggcgcggtcgtcaggattgcccaggttctagtatatggttacagaaggaacagacgcttcaacagccaaaccagcgaaaagctcagaaaggtccccatactaggcttctgtcgccaatagaggtagtgcagacattggaggtgccgtcttcaaagacagtgtcgggcccactcccttggtcggggtgatgaaaactgtccgctattgtaaaagctacaagggagctcatttgggctggactggttaagagatggagattggcgtttaatttgggtggtcttgctagaacctctcggtacagatatcgagttggtatacataaataccttcaatggttactacctcctgccgatgaaccgattttagccgtcgagaagctccgctcacaaaggaagccaatctaccgctgcgtagcgtcataccgatcactgcgtcgccaactaatcctaatctgaacgtcattacgcttcgcctagacctcgccgctgatttcacttcaagatgattggacattgattcaagtgtaattatgtgtatatctgagtacatctgaaaaaaggttgactcagacggctagggaccccttcaaaagttatggccttacaccgattccaagtcagctttgatagaaatctgaggctcagtctgacgcgctcgcgcgagactctattcgaatcatcgagaagacggctgcatggaagacgtcatagtccggctgtctgaccccatgtggttgggagcggactggcatgcccaagatgcccaaatacccacgaggcgccaagggttcgttgacgatacgttctgctacggacgatcaatcgcggctcagccgacagtcaccagacctaagacaccgaactttttggggacttacagtagccgtagcagcactcgatcaatcgacacgatcttttgttgtctatgcgatttgagaacgtctgcctcctaaaaatggtgattgttggatgtcgatcgcatctgagctcgaagctgggttctttcaagaatacaagggtctgtaatgttcagcaccgactattggcgacagctgcgagctcttcggaggtatggtggtcgacctgctttccgctggaggcacgtattctcccgtttttggattgggcgccacaagtacatgagtcctgaggagtgctgcacggtgtgatcaagacgactcgtgagacatctgcaaaccataagaaatatcacacatgctgacccgtttgacaaacgttcaaacaccctcgcatctggagataccacgccacacatgaccggtcggggtttgagattatgtagactgactgtacgtaaaatcgatttcggatgggtgcctgatcgaaatggatacaacgcgatcgatcaaatctatctatacgccatcatcctttccagttaggtgcgcaccaactcggtcctgaaacaccataaccttgcccacctagatatttgatccccccagcctcaaaatcggccggttagctttgaactctttttcacgctccttctctgcgggtttgagcttcttctcaccctccttcttcgcggctctcttgaccttctgttcgggtgttggagcgacgaattccatggctttggcggccattccagccaccctcttcccttcagctgcgactatcttcttcaaaacaccccttcgacttcctcgagacccttttgaccctcgtgagcttgcgcacgacgcattgtcgtcctctttgtggtttgtgatggacggactcaggcggccggtatcgatcgtctgttaatagttcgataataattcgatagtgcatatcaaccgggagttaacacctgcatcgtcccgaccgccaccccttcggtagccgtctgcccctctgcggtcaaggctgagaagttggctggggatgtagttggctgaaggatgaaggcgagcagccaatccgccagcgccggatccccccggattgtgtcgaaattgggtcttcaaccgggatcggatacatctgccgatctgaggcaatatcacgcggtatgtaagcaacaatctcggccttgtcccgggtcactgccgagtgacacaggtgtcgtcgtcagtagtgtaaaaagattcaatgtggctctctctcaaccctctctcccttacattgtccggaggatacagtgtaccaccgtgtggatctacagacccctctatcgagatggtgatgtctccggtgttttggctcgtatcacggctcgtaatggcggcgttgcttgggtagatttgcgatcaacgatatttctagtataggggcagaatatgggtctgtgtctagccctatgccctcgacctctatttatacacagcatgaccctagaaacgcaaggggactagctggaaccacaaaggaggatgagatttcctggtccaccccgtcacgtggagggtatcacgtcatccgtttcgatgagtatccagtgtcaagtatgccttgtgcggcttagagtcggccgagatgtaaatcggatcaatgatcgcgaggagggttcccttgataccacatggtcgatgggagacgatcacttgccttgcaaccgcacctgccaggagcgcataccactcgaggctttcctggttgatcgcataatctcgcaatacagccgccttgagaggggtgacgaatgagcgcgttgtcacgtcatctactatcgattcagcggatgttgcgctgatggccgtcgcgatgctcttagatctttctaagtgtagttccatctgcgtgatcacgcttccgacgtcgagcaacatcgtttgagaaccgtctggcgtttgcattgcgtcttcgtcgttgaagagaccctgtaggtctagatgtttgatggcgcgatgccggtcactgttgctccagctgccagtctccgtattgacgagatattcaggcaagaatcgcctatccagaatttaagcaagtcagcgtcagactcatcgcataaaccgatcgacttgccatcctcgtttcgttatccatgctacggccccgatgataaaatcgacagtagcatccgaatagaaccagggaaggctaattctaacggcgcctggtcggtaaacttttctttcgaggtagaggttgttatctgctgcaagggctagctcggcatcaatacccagaagatctgtcatgtaggtatgtgtgcaaaagcagctgtgtcgtgcctgcattgaaatgcaaagtatccaagctgaatcagagatgggccattcgccacgcaatcaggttgcttgcctgaatgccgaatagatcgctgagaaatgtgttcacaaagcccgcgtgtagccctttgatctgaagtgatactatgggtacccggtgaactttgtctggtgacgcgcccagcaatactatattcggtagcatgatccagctcgaccaagctttttgcagataggactcgggccccgagaccgaaggcttaacaagccgttttttgacgggcggaacggacttctatggcacggatccgctttgagcgtgaaagtctacctttctcggattccggaacacccacgagtgcaaacacgagaccacaccggatcgatccgattatgtccggtgttcctgcttcctctcgggattcaatatcctagataccatagatacagtgaattcgggcgatcttgaggccgtagtcttctcctatctgtgcttaccgaagtccatactgatcccgttcgcgagacaagttcgactacgccccctccaacggtacttggggttgagttgttgatcagatgtctcctggccaggagtacgcctggacacctatgttgcagcgagaattacctgtgtcagccgtgacgaggtgaagctacggtttgcccgaaagcttaccccggtccaccgggtaagttgtgcggagacaagaatatcgcatcggcggatgcttcgggtccatctgtgaccgggttcatgtccactggcaaatggctagcccagacggcacagtcgaaagccactattccaccatatcggtgcataatcctggccacccgcttcatgttcagagtaatgcctgcgatgttcgacgcagccgaaaagctaccaatcaaggatggatgacgcggttgctgacagagacgtttcaatgttgagaccaggttctcgtacgagaatgctccagcgtggacgtcataccaggacgacttgatcagcctacatgataccgtagtcggattttccagatgattgtcgtttcctgtcacaatcaaactaccggatgtcaccgagccagtgtttgtcgacccttcccagtcgcaatttcgctttggataatcgtcttgatggtaatacagagcgtcgttggagggatcccgactctctacggttgacgggtaattgcgcattgaggggatgatacagattccgttgatcaaggcggttgaagaaattgtcgctttgactagcttcgacaaccccagcaagcctttcatctgggtaggcagcgagaaagaactggcattcgagatgaatcgcgacactgcgtaagtgttcgatgatagatgtacggcaaggaaagggcaagtcggggtcagccatgatgatctagctctaggctatcgttctgcgctaatcggtcgcgactggacatgaaacgtttgatccttcatttgttgatcccacgcgtcgctctactccgcccgcggtgcaagagaccagattgtgatgaacggtcgaattgatgacgtgagtgatgacgtgggaatctcatcatcgttcccatttttgatgacgtcagcaccacctcgggaccccccttccccctgtgacctccactttctttctcgatctcgatggatcgaaaatgtcatcaacaacgaacaacgtagacgtagacaccagtagccagtagcgataacatgggtatataggagtcagtcgtattcatacaccatcagctactactccactctccaccacatccagctgtaaacacaaacgaaacacttacacacacacataatgcaagccgtactcgaccccatcgttggacccgccaagcccgaactcggtgacttgtctggcaaggtcagtcgtcagcctttcctcgcctccgcccttgtcacccagctgaccccggacaccccccgttgcagtccgccatcgtcaccggaggggctgaaggaatcggtgaggagatctcgctcgccctcgccctcgcccactgccgcgtcgtcatgatcaaccgtaaagagtatcaaggtgacgaagccatccagcggatcaaggacgccgccgccaaggctggagtccaggacgtccaggtagagtggaaagggtgtgatttgggagatttcaagcaggtcggagaggtctttggcgggttggccaagtcggaacctaggttggatttcgtacgtttgcggcgccgtcgtcgtcgtcgtcgtcgtcgacgagatgacgttgtgagctgacgtttcgtctcctctttgtcgtcccgcccgccccgcagctcatcttgtccgccggtatcaactcgaaccaatacggactcgctgcctgtaagcccttgtctcctcgcttcgcttctcttcccatcctcacctttccactaacccgctcgtcatcccacctatccccttaccccctctcgttcgacgacgcacagccggtatcgaccgccacatgagcgtcaacgccatcggtcactactacgccatcaaccagctctaccctctgatcaggaagacgtccaagttgcccaacacgtcggctccgagaatcatcttcgagtcgagcgagatgcacgtgagtccgacgtcgacgttcgatgccacgacacgtcgatatcggggttcggattcggatcggattcgctgacgtggggcgtgtctttgtgacgttgatgtttgtcgcagaggttggctaggaaggacgttcatttcggatcggtggaagagctcaacaaccccgagttgggtcccgtcgagttgtacggccgaaccaaggtgagcgtcggcgtgctgacccgattcatcctcgaaccgacaagctgacacgcacatgacaccccgcagctcgccatgatcctctactctcgatcgatcgctgaaaaggtcatcaagcccaacgctgacaacgtctacgtcctcgccgtccaccccggtgccgtcaataccgagatgcaaaaggtcagtcgtcgttgccgcgattccgcgcacgatccccgcgcatgaacactctagctgacggtgcatccgtcccgatctggtagcaatggcaagactcttaccccgggttgatgggcaagagtatcgaggccgtcaccgagtttttcggaaggtccccggagcagggagctcgatcggcgttgtgagtcccgggttccacgacacgtcgatcgatcggcgcgcgggcagggttgactaaactgggtttatgacgcttcataggtggtgctgcaccgcccccgagattgtcgagaacaactaccaggccgcttacgttcaggacgtcaagaaggtcggtggagagaccactcaaggtaagtctcatcgcgcctgcccagcctggtcctttgttgttgtcgacgacgtccagtctttgctgataccgatcaacctctcgattcgccctcacagcccaggacaagttcctcgctcaggcgctttgggaattgagcgagaggatcatcaaggacaaggtcggaccggacgctttgacctcgtgggaccgttaaacccggtgacgatgatgatggggacgtaccgcccggtcggggtctgacaagacggtccggatgggacgggatgcgcagatgttttactaaacgtgtagccagaagaagaaactgtttcaattagaatcggggctttcccgcgtaatcgacctgcagattatatagtcgacaatgatgtctcaacataaagggaacctttttccaggcgagagtgctggtctttacgagctacgaaacaccttcgacatggacatggacattgccccggctcggcatcacttgctggcgttctgtaggcccggatctacacctttaccttcgacaggcatgaccgaacccgatctgcgtccgaggacgactcggccttttggtcgaggtggcaagaccgtgttcggctttgaattgtcgacctgtgccacacgagcccacgagaagccgatcgtattgcgcgattccgaatggcacgaggtagattcgggctttccgtcttgtctcgggttgtcgcggtaagaggtgctttgatcgggttgatggtcagtgccagggaaacagcggtccgaccatccgggatggctggataggttgatcgacccgtcctgggtcgcgtttataccattcatcgattgatctgctcgatccattatcgtatgttatggctgatcgagaagtgggtatctttcgaccaacgacggcagtagtagatatcgtgtctggccaaagtcgcctttagtatgccttggcggaaggggcctagggaacggtgacatcgatttggttctcgagaagcgaacaaaggatggccgattcgccagctgttcccagattcgcgaccggacccgcaacgtgatcctggtgtatcagtcgatctggaaccagtcgattggggtcggctggatgaaacgtaaaacctcgcagccaacgtacagaccacaatggacgccaacgatcacgcgctgaatccattgcggcttcaccactggtatgcccttgctgaagctccagctcgatctggaccagtacctagagactcggacgtgataagtagcaaagatatctttacatgagcatgtggtcgggtctgatttcgtacatgatctatggtccgagacgtaagaacacctgacaatcgtcatcatcgcgaatcaaaagttccgtatcgcctacccttgcttccacctttgtcatcgtctttaccaccgccatctccgggctgaccgttcggatcgggctgtttcggcttaccctggggaatgacctcttgatcacctctacggtatttgcgcctcgatggtctcgacatcgatgggtcgcaaccctggccgcttgattctgaccatgtaagaggatcacaaccgctcgtgggaggtaaggtggtcaccgagctggtcggcaagaaaccgccatattcggtaaaagcccgttcaccacggtcgctctcgtcgtcttctctgcagctgttggaattgatgctattcattgagtgccgatcggaaatggatcggagtgggattaggttcgtcttgacgaatttgcgtgtatgagatctcggattacctgcgtcactacctgagttgcaactttgttacgtcgttgcccttatacttggcagggcagctagtcacaaacccgaaatcgagcgtgtaaacgatctttcttccttgcgatgccgaaaggtcttctcgatgtacatggattgccggaatctcggcgccgtagtctccaatcgcaggagccatctgtaaccccatcgagatgcgttggtaggttctgcgttcttcaaagtgcttcgtgcctcgcccatgcgaaacagagagccggatatcagcgggtcgatacgcctgagtgcgttttatcgcaaggttctccgcaaacctccacttcctcgttcgcctcctgcaccttcacaattctcaggtcaatcctgagtgaggctttgaagaagctcgaacgtgctaacattgtaacatgcaccagaacactcctttggtagaccgtctaggaagtatcatacaggacatcgcgggacagacgccagtaaaggtgaattcgcaagaagcaacggctgtaaaactaccggaagcttgtcacgatgccgacggccggggtgcttgccatcgccctaccgaagacggcgtatctaaaaacaccccggaggcgattatctatacccagtcttgagaatcgactagcgcgactagcgactagaaagccgcaaaaaaatatgatgtactgcgacatatactctaatgcgaagaatgacctcggcgttgcgagaagtgttccggaagcaaaatgtgtatctcggtgacttgtggatttgatcggaagctaatttaaccgaagcgccacgggggattcgcggaccgaccgaacgccgatatctaaagtgcggcgcactgtgagatggacgtttacccctattcgacgggagacaggtggtgtagtgtataacatggacacgtcgacgtcggtgtacccaaagttcctgcggcggcgtgacagatctgtacccccgctgaatataagcacaagataatcctcactaggtccctctaccacttgctcacgatgaccactacggatgcccccactcccaccttgtcggctcaaggcaaagcctaccttcagagcgtgctcgacaaactcggcgaaacccacgccgcgcagtctttgacgatctccaatgctgatggtcccatttttgacggtcgatccggctggtttgacccgctcaagcaggaacaagacgatcgcaaggccgcattcgatgacgtcctatggttcgcgtcgactacgaagctgatcacgagcgtctgtaagcttgaggctcgtcgagtcgatgtctggtagtagtggacgtaactgataaccactcggcaggctacttgcaacttgtcgacaggggtatcctctctttggacactcccctggcgcaatattcaaccgagctcgcatcagcgacctcccgtgtcctcgtccgcttcgacgagtccggcgagcccgtcttcgaggatgccaagacccaggtgacgcttcagatgatgctgaaccagacttccggatttggacaagagatgagcgagaagattcgacaatggaagtcctggaccccgaagggtcgaggatgggtcaacagttgcaagatcgtgagtatacgaagttctgtccgacattggaacgaacggctgatctaacaaacgcgatgtcaggaaaaccttgtgcatacacctatcacggaacaaccggggagcaggtggcagtacggaaactctgctgagtgagtccggacacccttacatatacaccataaatgcaataacaatgggctgactaggtaaccatccgctcagatggctagccctgatcttgcccaatatcttgaaggctcacgacattcccttcgattccaccgaggcctaccttcaggccaacgtcctcgaacccctcggaatgacaaacactacctattacccctttggagaacgcttcgagggcaggctgatgccccttcgatggtacaacgaggagaccaagtcttacgaggaactggtcgaccaatgcgatctgctcaagctaccgaggacgtgcgtgaatcgatcacggtttcttctccttctcaggtcagctgactgaaaatgttccctacagccgagaaggtatcgagtatcccgctggtggtggtgggatatactcgacgacttccgactattctaaactgctcacacacttgttgaagtgtcagcaagccgatcgctcttcgtcgacctatccaaaagaagccatcctctcgcaatcgtcagtctcgtcactcttcagcaagtcgctcccgaccgaggcagcaagagaggacattgcagcttcgttgaactcgcggccgatgtttgacccacctgccaaggagcatattctcgaagcgggcgaatatgattggagtaccggcgtcgggatgtttgtcacccgtgagcgggatggtaaggaaggccatagacgcggaggtgttggtaggaggtccggtagtgtcggctggtccggtgccgcaggaaccgagtactggtaagccaccagctcaatgcagcctcgttcgagatacgggctgactgaaatgactatacctaggatcgaccctcgagctggcattactgtgagtccaagcgcccctagtcagctctgattgacatgctcatcgtgtttctgcatttgattaggccgtgtacaccacgcaaatgctgttgcctttcacgacgccaatcttgcacgccaagaggacgctcgagaaagcgatctatgatgtgctcgaggacaggatataatgacgctttgatacgacttcccgcgtttccggaagcgaggttcgagcgacagagctggcccgtagcagcacgatattggatacagtattcgcttctaccctagatcacataattatacaatcttctttgacggacagggcgtacatcgactgtttcatgtgggcgtgaataagctgcaactccagctagatattcaaagggactcacgttgtcgaccgtcttttcgatctttttccagtccgctctgcgttgaatgaattcgtacaaatcttccggtcgatatgtccctccatatctggtcacatctcggatgatctgtgccaggtcttttgcgtcggcgacaatgtagacctgaccgagcatcttgagattcgaaaactcttccgccatacgaggttgcttcaaggaggcaacaaaggcgtagtaagcgttaagatccgctatcatctggaaaccgccatcgagcgagatgatctgtcgcttgatgtgcttttgcaagatgctgatacccgggaggtcacgggtcagcaaaggcttctcctgttgcgcttcagtcgatgacttacttctgaagacgtaggccaacctcttggtaaaacacctccaacacttctttcgaagtgcttcccttgagcaatttgcaatgcacttccagacatgtgatcgcatcgacacaagctttcgttggacccaattctggattctgatcgggagaagggcaatactctcctggctgcgtgcgagtctggatgatgtgttccacctgtttcacatgcctcagacgatcagcaaacatagcttggctggcatcattcaaatctataggctaacttggttcatcaacacctctactcccgcattcatcccagctgcgactgcatcatcgagcgctccttcgaagcgcttcttctcttgcatggccccgtttaaaaagtcggttcgatcgatgtatttggcctaaggaagcattcgttggtcattcggctcgctgcctggaatgattgactctgcccttgaactcaccaaatctttgtcaaagtagacctgaagaatcgacgtgactgtgtcgactacattgacaagctcaaggtattgcagcagagggggattacttgtaccctcagctgaaacctctggcttgtaatttgtcatctgctggatcgccctgaagccacaaggaggtgagcagacgacattacgcatcggaaaatcaagaagacgtacttgttgcacgcaggtacgatgtgacgtcccgcaaccgcacgaagcagatgaatgaagacctcctcgatgccctcgcgcaccttcgtgccgtatttcccggggtagccttggaacgtttctatacgtttcaagcattctctgtcggcgtgaacgaactcgagcaccgtatcgagagacagcaacagctgcattttgtccccttcgtctttcgccttctcttgctccgcgatcgactctgcctccagctcctctgcctttttccgctcgctctctggtccttcgataggatccacggggacagctggggagccattagcggtacctcgtccgtcgcttccactttgtccggtccatctttgcgggttcaacatcgccaagccgttgacggcttgcgtcccaccggtcacgatagcgttcatgccgtacgtgacggtgagtggcacgatggtcactggaagcagcaaagcgtctctgaaaccggcgagaacgtttcgcttgacttgatccgggttcgaagaggacaaaaaggtggctgcctgggtaggttgtgcggcggtggcattgcccatctaagacgacaaaaggtcgggtcagtaaggcagtcacggctggaaagcaattcagcgcgcaagacctaccttggtgtcccaagccttgcacatcttgtctaggacgttttttatccattccacttcatcctcgaggtattcatccatatgctgttcaaacgcagcgtaactgtaggtcgagcacataggatcagctcggtacccgccgcaatttcctcccaggttgacgcacactgccctttccgcctccaacccgacggcctcgacggctcggcttgcccatgggtcgagctgctcgatgtcctttccgccagaaacagcatgccgtacgacctccttagccacgtcgacgactcgccacacctggacgaaagtagctgccgtggccgtcaggaacaagtcttgtgagaggagtcgagtcaacgacagtagagacgagacgtattccgagatctatcagagcgacggtttctgggtaagtgtcctgaaggcaagtcaaaggtcacattcctacaaggacttacgacttctccgacgaggcggtcaacgaatcgcttgaccacgctcgcaccggcacctccatcccggaccaagccgtcatcttcacccgtgccaaatatccgtagcgcttcaccgcagtcctcccgaatcctcgctagcatacgttccataaagacggccgacatgggggtgaaatccagcgtgtgcgtcgccggttctcctttggccgcggggagtttgctatgggcgagctcgtcaggtttcgatattgcgaacgaaaacgactacgaaagaagggcctggcgctcacacaatattttcgccactgtcccatttgccgcccgaaccagactcgtaaaacacctctcgtttctcgacccacacccgtcccaattcccatcctgcatcatccccatccgaaccgcctattcctccccatccgccgagtccggccgtgaaagagattccagtgcctttaccgctcccggtcgacctgaatcgtgatcgactggaagacggggaggacaaaactttggacctcgccatcgacgtgtgcactttccaactcgccccggcgacccttctcatctcttcgaccagtttcccgtctgaccccgagagactacctgcaggttgagtggtggaagacgtggctctgcgttccagaccttcgaacccgctcagacaactcccatcccagcggtcgataacacctccgccgccgatgaggacacgcctgatccacgcccaatcggcggtaggttcaatcaagggggtgaggagtaggaccagtctcgcgaggacggtcgcctgatcgaccagaggcagcgggccgggaacaggcgagttgggtgaatacgatgaagggaacaggagagccagagtctgagtcggcgtgaggtgtgttgacgtactaccgccttgctgagttggcgaggatgaggcggacctcaagattctgacgtagggcatcaactgcatatgtacctctttgtacgcttcgtaccacggactcggtggtttggcttgcgtcctcgatatcgagctcgttcgcctgacgtctgccacgttgacggcggggagggcgaaaaagccgctcctcggtgcgccttttgccttttctggcgatttcgcattggacggcatgggaaccgaatcgaaatcaaagtcgtcgaacgcatcgaggtccatgaggttgggtgtgccattgggcttcttggacgccgagcccggcggcggcttgcccaggacggcgatcctgcccccgttcttgctgtcccgacgtgcagggttcgaggcggtcgccatgctctcgctaaacgctccgaattcgtcctcatcatcgtcatcctcgaaagcgaacgctccaggcaggcgctgtccagatgcgagaggtgccactgtcggattcgtcatggacttcaagctcgaaatcgaccctgtccctcgatgtcgctgccgacctccatgagtcgaggcagatccggcagcatcttcttgctgtttgccagtctgtgcgaccgtgtcgacttgcactccgagtacctcacacttgaccttccagatcttgtcggccgtcttgacgagtcttgcgagctgtttgcatgtggatgcataccgcggtatatctgacactggcaagaatgacaatatatgtgcgtgaagactagcgggaagcctgcctagtcgaggctcggcgttcgagcctttaccgaatttcttggatgaactagcattgaccggtataggttgcaagatggaaaaggccgtggatgagcgaccttgtgcggatcctcctgctaccgccgtgggtggtgcgacggtttttttgctcgaccacatgacatcgaaggctcggggatgtcgggatgcgctgatgctatatgatatggctacagaatggtgctataatggcctgtatgtcgtctgtgacacgacgatcgattcgagtatatcgctcaatagtccctcaacgagccactaccactctagctgtgccggcctccataagagctagaaggtcgatggacccgacccgcccgagactcggatgcagcaaacgcgtcgcctcgataattgaacgacgaacatcatggtatgcatgcgatatgacaataaagctcaaagccgggaactgcctactttgatgagcgtgtttctatgtattgggactgtgcgagagtgcggagaggggggtgttacaaggtggtatactgagctggaacccacccgggtttacagctgcttgagacgcatgaccaagttgacaatgaccgacgacaccaggacggcacagaggacggtaggtccgtaagggtcgtgatagttgcccgcgtcacgtcgtcgcagtttgaacactcgccatgtgtacatcccggcggcataggcgagggagagcaaggcggtaaaggtgaacatcccagcagagatgagtccgaccctgtcggtcggctcgataaagttgagcagcgtcgtcgcgatacctccgatcagaatcccaaagtgcaaccactacagccagcacatcaacgggactgtcagtgaggagctttgtcaggaaaggatgatctcgactgaccttgaggaatgttcgctcgttggcaaagatgacctgaaggtagagcggcccatagcagaacagcattagcttttgctagcgtgtctcatctcatgatactgtctacggcataccttgggttcgatcctaacggggatagctatccgcttgtctgcgggagcgtggacccgagtgtattccacgccgttaccctcgggcaagggctgtgcctcgtcatcgctttcaccctcttcccgaagaggaggctgtcggtcgttctcgtccgattgcttggccttgaaaagcttttgcaagcttcggggatcgaggagcgagtatttcttgtcgtacgatcggctgggctgaagagggtcaatgtcgagacggagaccgtagtcgcgctgactcgcggtcgattctcttcgcacgggctcgggagcacgaccgctagccgccaattctttcagctacgaggttggaacgacatgatgttagcgaaaaccattgagacctggttcgaccacggccgaccgacattgttttctcgctcctcgcgagcctcttgagcttgcctgatcagctcgggaggcaagtttaatcgcttgacttcgttgtgacttgggtgtaccaggtattcgtcgtcttcgccttcactgttgggctcttcgtatcgttgctgaggactagaagccgagttggtacccgacgtcgagctgacgttggcgctgtggggacgttcgatcgcgacctttttcgcagtctccggatcggcgggccgacgaatatctcggtccatttgcggttgctaacgagggagaccgggagcatcagcaaagacactggttggttgggtcgcaaagactgcggtgcttacccagaagggaatcaattcgactcgttccggaagaagagtcgcacatccgtgaatgaactatcgcccggaacgagtgtgtcagctctgccgtcggttgacatctcctgcagcccctcgcgatcccaccttggaaaacttgggaaccggggtgaccaaattgctgtgtacgagatcggtgacccaggtaggaggttcctgacccaactgcgtctgcagcttgacctcgaggacagcatagggaaagacttccttgtccttttccgtgacctcgtcaaaggggaaatcgatacccatgtcgtcccgtcgccagttctttccggcgcggggcttgccatcaaaatcgtcttcccggaccatggtcagctcggtgtcgagcgagattcgaactcgggcgtctccgggaagctggaatgccgttcggttgtagaacgaacgcatgactgcagcggcgcggcgcggcgatgcgagagagtcagtccgacgatcttcctgtgtgcacagccgcaaacacggtcgactcaccaggcttgagaccccgggtcaagatggcgtattgcacctcgttggccaattgcttcatgctgtcgacctctttgaccgtctttttaccccgcttgaccagttcgtcaaattcgtcatccatcgtcagtcgaccggcgatgaaatcattgaccttgtgctcggcgatggcgaaccgggccttgacggatttctctccggtccagtcttctcgatgggtctttcgctccacaaagatctgtgcgtgcggggggaaatcgacttctgtttgagtctcacgccggaccagaaattctcaacgtccgaccgcctggactcacggtcttgttgctgacgtcaccgtaccatcgcaatcgaatagcttcggctccctcggtcttttccaatcgaccgagatacaattcgagggcctcgttgtcaaagtagattgacgtgatggcggaatccttgacctcgaattccttgctcgggttgaacactgtcggggcacgcaagtcgacgtcagcatcggaagctcgcgagacgactggctcctggcactgacccaacacgggaagctgcttcaagatggccaacttgagatgaacaatgttatcctcgtgcacctaagatcaaccgcgccaagagtgcatgatcagtcaccgatctcctcgccccggcatccactcgtgggactcacccagtacttggtggtactcctgacgaaagcgttctgagtcccaccggctgccgagtctccctcgatcgggtgaccacgggttcgcaccaggtcaaacaatcgggagagcttgacgatcagcccgtcgtagttgtactgtgcgacgtcgagtcggcgtgagtcagcaggtttccaattcgaatgcgggtcacgatgctgaccttgtagaaaggatgcttgtcgaggtactctgcgctaaagtacgatttgaggttgaatccggtcactttctgtagtagccccgacgagtgagagtctcagctacatggtcacggagtatggcatcggtcgtgttccctactcacgtcgtgtttctaccaacgacgaatgcagatattcgggtccgagagatcagcaccgacactaccacatggtcgctcttggcgacgtcgtctgcgtacctttacgatcttgacgaaccccgtaaagttgagtttggtatacagtgccaaatcgtgtacgtcggcgacgagggtggcgacctcttcttcgagatccttgaatttctcatcatagctcgcttcgctcatggcatcgtcatcgtccctggccctatcatcctcgtcgtcgtcgtcatcaccatcgtcgtcctcgtcggctgaatcttcatcgtcagacccagcgtctagactcctggcgagcccgttatccttgacctgacgcctgacgccggattcgacgtcccgggcgttcgagttcgaggtcgaggtggccgtcggggtaggtttcttgcccgcggtggcaggatcgagttggatctgggattcgtcgtaagattggacgagatgggtgacttgacgttcgagcgaggtgatcttggtggacaattcgtctgcctataaggtgggtccgagcgagtcatcagtcctgggtattaatatcgatcacgacgatcacgaaagtgtcgaatccggtggctgaccttgccgacctggaagcgttcacacttgaggagctcgttttcgagtcttttcacgaaagctgcctcgtcctgttcagtccatcggtgcattccctgaggtccacctcccgagttgttcttaaggtcccgtttgagaccgttgtaatcgaggtaatgatcggaccattccgcgtagagcgtcgactgtgggggtcgtgtcaaagttgtttaagcgagagaaagaagtgttacaggtggatcgacgatcatcagccacgggacgatggatcatggaccggggaggattgggaggacttgccctgatacgttgaccaaacttcatgatggcgagtgatagtcggtgagaggtgggcctgctatggcgactaggtgacgatcagtctgatcggtgcgatacgatgatgatgatgatgatgattttgccgtgtccctggtagacttttctcttgcaggtggatggtgatccgatgatgactgtgacaagtagctagtagtagaaagtagcaacttctctgtaccaccaactactttggagcagagactgatatgattgcacgtgcgtgagctaatgctgaggctgagcgggaggcgcgcggggggaaggggggaacgcgcgcggatgtaaaacacacacatacacacagacagacaggcctagctaggtcaatagctaggtcaaacttaaacgtcaattccgtctataatttataaattgtggatcgtggatgaatgcaagattgctggtgttatccaatgacgacagctatcgtggcgacaaatgttccatccgaatgcgaacgtatccctatctaatcactctgcaggggttcactattgaccgagagccgagctctgtctgaatgccacgaggttcaaaggcaacgaacgggtatgtcgccgtgcatgtctcgtccgagtgcagagacatgtttcgacccaaacaagaataaccagtttccaatgagacgagaagagtagaatgacaataaggttttcggcgtgatcgtttcggctcttaaatgtataatacaacttggtcgtgattgatctcattctcgcgggatcgatcgatacaagaaggaatagcagctgcacttgttcgactcctccggcaatgtacgccgctatacaattctcggagcagagttacggctttgacatgaacttccttgatagaaatacatcctgattcggcatgataagggcaccttggacattcggtccatagtcgttgcaccgtcagcttgactgactcttgactaactctggtaggtcatcgtgtcgttgacattgtcccaccattcgtggcggcaattgaaatactccaacgcggcctctcgcgcctcggacggtacagtccaccttccactatctccgtcttctttatctgagagactgggtaaatactcctcgatgaacctccggaacatgggtcgtttcttgaccaacacgcggtctttcttcctcaattcggacggtctgcttgtgggtcttgcgaggtgcccgctcaggaggaaatcgaacacctggtactctgtcgcgaaccccttttggaaactattctccgagagacccaagaatccgatgacggcttttggatcactggtgagccaagtcaaatcgtctttcccttgagcccggggttgacggagaaagaaccccttgtctgtgatcttgagccggatcggtcttaggaggaaagccaagacctgtccgagatcggcatacgagttggtgaaactctgccaatcgaacaaatcggccgggcagtgtctgatatcgatctggacgatggctttggggatttccggatgagggatcgcgtagctcgtcgatggtccattcgtgatgaacccctgagcgccgatgtgttccgctagggtcgtcggatccgtcaccttttcgccctcgacgacgatgaaatcgacgtccccgtgatcaggtttctcccagaccggaggcgggcaacagacttgctcgtacaggtcatcgaggacgagccgtatttggctagagatggtattgtacagtttcggcgagaggcgcggggcttgccaacctcggctatgaaacgcgcgaccgcccatgtatcgattccgccaggttaggatggggtgcgggttgtactcagagttcaagtgtctcgtacagaaatagcgctggggaacctcctctgtggagatacccattcgtccctcatagagaaaaggccccttataaacacctacgaggtcattgttcgcctcgctttctgatcgagtcatgcgatgccaatccccgatgacgtccgctgactcgccaccggccgagacctcctcatgacaatctactggtcatacgctatcgaccggatcatcgacgtcgtagcagcgctgcacatgtgatcgcattgtctctcgactcggtgatccggggatcgtcttcgagggtgatcggtcgttcagtctactcagtagctcagtggaagtgctctgggccagaaaaacgaatccgggccggcgaggagaaaaggctcaaggccggtacaacgagcacatcatcgcggctgtccatgtgatcactcttttgtcagcgcttcacccggttgcaccctgcggccagtccaccatgctgagatcaaaaggctagtgtcgtaatggacgacagaggcagctgtaggtagttcctaccttagatatctctggcaattcggtgtttgctctgcttgcacgtgccatctgggttggacaacttcggtgggacttgcaagaacgtacaattcgagcccagaatgatcaactctatgacctagatgggctgctgcgctgctgagaatgaccccccttcaaaatcctcccgactttggcaagtgtagtatgtgtaggatggccttgtcttatcccatatacgtgatctccatcgctcagctgtcgtgacctcgagactatgtgacgagatctcgggtctaatagaggagaaagagtgtgacacctttgtgatatggatgcttgatcgactggcgactcgacctactctgtacatttgacccgagactctccgtcgacagtgacaatgcaggtcatccaggtcatccaggtactttcacaacctcgtctcaatatcaagtacatatctcaggctcgggatgatagtctagtctctagcagacacatagacttgtagcttatcgacaggatcgacgtcaattccaggtacccgggaggaaacgactcgaccccatcgcgtacaccgggtccaggtcggacctttacgctcgacggtcggtcgaccgattatcatcactcgactcatcaatcccgacctccgccgtcgtcaacgtggctcaagtttccactttctccgggatggaacatctgccaacatctagaccgtcgatgaatgggcacgtcgattcggccgacatgtctacgtcggcaggcatgtggaccccggccgactctcccatggtcaccgaagccaacacgcccaaccccgtcagcgatgcacctcaatacgtcgtacacacgcagcagccaacgacgacgacgacgacggcggcgatggaaaagttccatcggatcgacacgctacatctgaagagaaagctgtttgaagcgatggggtcgaacgaatcgtcgggggagagcgaacaggcgaggtcgtactggcagtacctgggccagttcgtcagaggtaaacttcggcgggaagagtttatcgaattgatcgcagaggtcctggatacccactataaaggtcggtccttggaacatgtgttcagggcagtgatcgtcttttgcctgctcacacggcacggcgccttgcttcaaagtgacattgcacaaccacctcctcacggcaatcttgcacaacgccgtgtctacacaacccatcgcgtcgactcccaccctacccgtcattcagtctgctccggaactcatggctaatggcagcaatggcgacaccaacaacaacagcgctccgagtccctcgtcgaaagaccgaccggcaggcgatcaggaagacgtctcgacggctcgaagcaaacgcccgcggaacgaggtcgacatctctcaagtccccgacgtcttacccaaacgcactcgagttcgagaatggcttggaggattgaatcgagccgaacgggatcgtctgaaacgattgggtggatcagggatgcaagacgatcggtccaagattccgggagagatgcagaggggttatcagggcaggggaagattgagacagaacagtatgtcgttatcgtcctcacggtcagctttcgctcgagcaggtttacgaacaacggtcgctcgtcccgctcgaccaggcaaaccgcttcgacccaacgtcctgtcgtcgttgcatcccctggcgcaatcgacagggtacgtgcccagtcagttacagctacgagagaggatgatcgacctggccaagttgaacgggatgaccgagggggtcgctgaggggatagacgatctgctgggtgcggcgttggacgtgagtggagtggatccgaagcgagacgagtggatcgaatgctgattacgccgatttttacccctttccccctcaaaagacccacctggacagcttgttttgtggtgccatcgaagtcaaggtcaggaaaggcgatgtggactcgagcgagcgggtagatcgtgacgacaatatggacgtcgacgacggctcgactgacgagccggaacctaccaaatcgaccgtcgtgctcccaccgccgcatccttcctccccccgcgccgcgggactcaacattctcaaacaggacccgacatacgagctcgccgagacggacccgatccatctcgaattgcaagatttccactcgttgttcaccctggcgcctcagatccaccctcacctgggcagcgcggtgtggcagctcaagaatggcatcgcactgcgagaggaacagctcgaagatgaatcgaaacggatggaagcgtcgtggaaagtctgggcggaacagaagagcgagtcggatcgatcgctcgaattgctgtttagtgggcaattgggttctcgtttggcgctgggcgtgggcgtcaatgcgacgggttcgggttcggggtcgaggtcgggaggaaacgcccaggccggacctggacctaggtctacggctgctatgtcggccatcgaagcttccaaggctaggatggatcctcagcagcagcagcagcagcagggtcgcaatacgccgagcttgtccgtgcccccgactccaacgctgaaccacgtctcgccgaacggggtgatcggttcgggaaacaacggtacaggtctcggggccggatcacgatcgacccctggcttactcgacagggttcctcccgagctcgcggggatgccgatccgacctcaaccgggtccgggagggatcatcatacgtcccggtcgtggtctgacggcgagcagattaccaccccacctggctgccgccggcttggtggactatggaggaggatcgaggcgggagatgattctgcgcgagttggaagccagaaagttgtacaaggtgatggacggccggccgatgtcggggatgccgccgatgttgcctcttgcaggaggtcctggtacgacaggcccgggtcaacctccagtcgctgccacggccggtggtcacgtcccacaaggagatacgaggatggtcgatccaccagttgcatctacagcgggacctggaccgggacatgatctcacgcccggacctggattgaacgtgccgccgtccatgttaccattgcaatcgacgcatggtcccaattattggccgtatgtggacccggcatccatctttagggacattttgggatgatcgtgtgcgtgtgtgtgtgtgtgtgtgtgtgtgtgtgtgtgtgtgtttagcacattgtgttgtagtaatgtagaactagcactcgttcagaacgacgggcatgtcgacatgtcccaattgcgttgtgtcgtcgtcgtcgtcgttgttgcggttgtttgtttgaaactcgacgcgaaactggaacgatggccagcaaaacacgaccacgaccacgacgacatgatcacatatcgttggcatcatcatattgtcgacatccatcgtctcctcatgctcccatcaattgccctactctgaacacctcttgacaccgagcagagctcctagtcagccagatcttcacgaccactgttccctacatcccccgcccataacatcagacgacgtgacacgaccccccatctcccatcaacatcccccccgccgaaacctgcgtggacacggtctttgactgacgacctatcactacgtcttgatccaccctgccacgacctgtagataacaaagacaacgaccatggcccatcaccagtccaacccagacccatcgtccgagcactcggcgacctcgctcaacgccaacgggttcaacgggatcagccgtaacatgaactcgtcccccgctccacccgtcccaggtctcaacctgtcttccacccatgcggccgctcttcaaccgggaagcatggtcagtcctgggatgcccagtggagtctcgaccccgatcgggacggccagcaacaatcaggccggagggtacatggctgccaagggacaagctccgccccccagccccggtcgtgccgccgctgaacaactcgccggaatgtccctctcggactctcgggacatgtcctcttcctcgtcggccggtcagatccccacgacctcttcaaattcgaacaagggtcccgattatgtctatttccaacgtaaccctcaacagtattccacccacatttcgcagaaatcgaccgcgaccaaaatgcgaatggaattgtactacaagcaggccgtcgagggggtcgttcagaggaaagagaggagggtcacgctcgaaaagagtctgatgagtgaaggtggtcggggtatggaagattggcaaaaggccaaacagctccaggcgctcggaaggagggagaccaagtgagtcgtcgtcttgcccgtacgacgatgggcagtcgacctgggtctagactcatggtcgacgtcgctttgcaatttttctcgcagcttcttgcgtctccgacgaaccaagatcggactcggcgatttcaagacggtcaaggtcattggtaaaggagcctttggcgaggtacgtcgagcgggattttcacgcccggatgcccggtcatcttgatcctgatcaagtcccgattccacttcaactcgacaggtccgactgtgccaaaagactgataccggcaagatctacgccatgaagacgttgatgaagaacgaaatgttcaaaaaggatcaggtgggcgatagctgcccgccgagtggtggaggacctcgaacgggaaactgatgttgtcgctgatccgtgcagctggctcatgtccgagccgagcgagacgtcttggcagaatccaactcgccttgggtcgtgcagctgtactactctttccaagattccgactacctctacctggtcatggagttcttgcctggtggagacttgatgaccatgtaagtcgtcactcatccgagcgctcatcgaaccgacccagctgagccagactgatccgacaggttgatcaaatatgacacgttctcggaggacgtcaccaagttttacatggctgaatgcatcttggcgatcgaggccgtgcacaagctcggctttattcaccggtcagcttggaatcacgctctgcgccggtatcgatcgggcgatcctaatgcgtcatgatcccgacagtgatatcaaacccgacaacatcttgatcgatggccaaggccacgtcaagttgtccgactttggactgtcaaccgggttccacaagcagcacgattctgcttattaccaaaaactgctcggaggtgcagagaacacctcgcccaacctcgatgcgggaaggtccaaggccggcgcgaggaacagtgtcatggtaaacgcgatcaacttgcagatgacttccaagggggacatcgcgacctggaaggccaacaggcgaaagctggcatactcgaccgtcggtaccccggattatgtgagtgaccgtgcacgtgtacgtccgatcgaaccgacgctcagtgattggcatttcaagatctctcccgaaatcttcttgcaaaaggggtacgggaaagaatgcgactggtggtccctcggagccatcatgtacgagtgtcttgtcggtaaatacgcatatgtgaaaagcgattgctactgcctaccatgttgacattccactttctctgcaggctacccacctttttgttcggagagcccccatcagacttaccaaaagatcatcaagtgggaggaatacttgcagattccaagcgatgtacaccttagtcgagaagccgagggtatgatccgagggtgagtatcaaatgcgattcggacggctcgaccagcacgttgacctttgattccacatcgcgatagtctcttgaatcatgccgaggcgcgtctcaacattgatcagatcaaggcccatcccttcttctacggcgtcgattggaacactatccgaaacatcgacgctcccttcgtccctcatctcaggtcgatgacggacacttcctacttcccaaccgaggatctggaccaagtgcccgaccttcctgctcctagagagcccggaaacggggctgctaaagacttggctttcttgggctacacgtacgtcgctcggtaatcattggctgctcgaggcaatcgtattgacagcaactctgattgaacagtttccgtcgatacgaaatgctatgagcggaatacacgcttcatgaagtgcgaaccacgctccgcgcgcctgacgatgtcttgatgatatagcctgcaatgtatcctgttctttgccctcatgcctgatcaaaacacgatgtttcctgctcgtttgactagcccatactggtgccgggaaagagccattcagtacagaactgtggggagtcacccttgaggaatcaaactttacggaaaagacggtccaatctacccagcgacatgaccgatacctcggactccaggcagaaaaagtccagtctgatttgtcgagtagacaaggctgcagcgtgcaatttacggcgggcaattcggcggtatcttgaacgaaaggtgatatctatgtggtacaacctgatgcgactagcacgtctacccttctatacaacttcagattattggctacaattagacgttcatttcgaagcctcttttcgggttaccgcgaatgattgctgcgaccatccgaatctagccatgccaaggcttcgaacatgtccatggcctcaagctcgggttttggtgacagaatgcctggactttccacaagttctttagcatccacgggattccgggcgtcgatcgtctgttggcgctgcatgctttccttcctttgcttgcttttttgcatactcttgtatttccgcaccggccaggtgatgccggatttgcaagcgagcaagacatctcgctgttcagtcgcatgcgagtgtcagttgcattctggaaagcaatgtggtgtcgactactcacctgagacccaaaacagatgacgacggctggggccaaggtggcgttgaccaggtcgggcaaggatgaattggccgcggatttgtcctttgtatgattagagcgagagccctatggattaatttgaatgccagaacatcgcataggtatagcgaatcgactgaccacaacgatataaattgatactctggatcatgtatgaaaaccgatcaggagagtattagcgaagcggagcagtagatacttcggtctctgaatactcacgctgcgagtagcctgaaattggagcaaagttagcgatggttattaagcccagcctgtgaaccgagtcgctactgacacagtgtacgctccgaaccacagaatacgcaacgtcaatggcaaattgatctgtttgagcctgttttgtgcgttgatctgatcgatcccgttttgcgattccaggttggcagagtctgaatcatcgagagggctgtttgtcggcgagacgccgttcctgggcgacatctcacgatggtctgctgcgctgcgacgtagctccttgtaatgcctgaacacgatccaagcgagatggcctgcaacaggtagaggacagggttccgatgagcacctgcggtattcccacgagcaaatttggcccaagcatcagtcaaactcactctctaggacgatgataatggccgctccggccgctgatgtataatgatggctgtcgacactgccggcgcaagcgctttgatttcagtcgcgctctacagatggatgtttatgtttaaggcacttacgtgagatcgctggtggcgtagcagtataatactgtcggcttgatggaggatggatctcgcaggcccacctggaaaaattcatattgaccgagttagtcgatagactggaagaaagctcacgtgctttacttacaacaagggtcatcaccgcatagcctatccatgccagccacggcgcgcagaacagctggcaatcggcacaatcgcatggcatttagttgatgcgctggaagaaagcagcgacacggcgcgatctcatatactcacggaccagccgatataggcgcggtccagaaaagcgagtttctgtgtgtccagactggctgcggtgacccatacctaaggtgatattgaggggacagacgtcatttggtgattctcatcgtatcgtttcccactgtatcgctcaccttgactacaaggccgagcgcgctcatagcctgtgcggtcgaattaccggtcgtgaacatggcttgcgccagacacaacttgaatcctggcgggtttggattctccttggtgacaaaaccatgcgtgaagtaggtaaggcagtggaaaaagcaggcgagaatcaagacgatgaaaaaattgtagactgatttgtctctctggatgtccttgttggcccaaatgatcaacacgacgatgggcagcgtgacgataccggcaatttcgagtccaaagtaggccttgacgtcagcgggcttgtaaacccatggcggagctttcgcaaggtggtacgggtcatatggatcccggcgatcaagcaccatcgttcgtcgggtcgtgtccagtagtgaattttgttaggagaaatcggtcgtatcgaatctcgctagagtaaaatcggagcccctgatctgctcggtgatcgcggggttcgcgatgcaggtctcgaagccgaagaccgggtgggttgtatacgatagtcgagctcttcagaggaaatctagcatattgatgaagccaaacgctgggataccatactacaatagcccgtacaaagctggtggaccacatatacccaggcatctaccgacgacgaccacgacattgtgtccgatcgcctttcgaatgtatcggcgagcggtccttggggaaaacagcggaagaaccgccccggatgacttcgtccgcactttgctacgtttcccagagcgtggtgctgggtccgaaacggaatgttctcattcctagcgacaggggcaggggcgcagcaggaagaaacgccgttacgacaaagccgaagccacaactgagccaaccccggcaacccccctgacctctgtgagataccgctgttcggtgaccgggtcgtcactgccctgattttccgccgcggccgccccgatcacctctaccctcctcgtgggcgtgggcgcgccccctctcctgcgcctgcactttctactgccgttacctattcaccaattcaccgtttgatccggctcgggagaaaggaccgatcgttcttccaaggcttccgcgtctggaaagtcccgttcattcttcttttctgttcgccgcgtgctttgcgcccctgatttgcgggacttttcctcgtggtgggtcgtcgatggaccaaaagggtcaatcaacttcggtcccgatccacctcgcaggtaaagaatttctccgatgacttcgatcgtacatcaatcatcatcggtgcaaggtgtcggaaggtaaacgagagttcgagacgtgctctggcaagggcgacaacaagtcgtctcaatcacaacgcctcttcctccaggcctagagcacaatgataaggtatcctaacctctgccagtaagcagtgtatagaatatgctaccgctggtctggcgttagcttctgtgcgacccagatgaagcccgggtctcgtcggatacccgtgcgctctcgtgagcctgagagacgcgcaaagcattcagccgtacgccctacgaccatagtagccggcttctcagctcgaggcgagaacgagccgctgggcacgagactgctaccgtggcgtttctcgatgacaggatcatgcgcccggcagtcgttttccggtgaagagggatgtacgaactgcacgttatcatgagacggtggcatgcctgttgggcacgggttgatattctggacagtcacagttcacagatcaagacggtctcgcgttttctggggtcgaagcgggacctcttgccgtccacagagtgagggcggcggatgtaacgacagagacatcactgtgtcatttgacttcgacgtaaagcggacgctttaggccaatttaaaaagaagaactcagtcccgattgttatcagttcctccgctcacctagtggcttgcaacttcaacaggcggggccggttgaccgtgtactcttggcaatggagcccgagctcgttcgagcggctcgtgcactcctcctgaccgcccgcatcatgtggttccactcaggtctatttgcctcactggaatcacaactcatgaaacgctgaccgttcgaaacgccatgcgagcgatgtatacttgttggtgatcagaaactgtgtacgtacagccatcggcgtatcgaatccagattccatacatttcataaactagacgttttacgcctgcatcgtgcaagaaaaactcgtcataaatcggaggaaaacatcggtacctatgaagacgttgcgttcgatacgtgaggcttggacgtgccccgaagacaaccgcagcttaggcacatactgtagacgagtcccgccaacgtgaagatgagacacctgatgagcccaaccacagagctcgtcctgaggaggtttatgcaaggttgcagcgtgatttctagcgcctcagtctggagctgcacaatgtatgggtacgaccgagaagcaccgtatatctttggcagagcgcccctctctcgtgcggagtccttgataaatgacatctaccatctatgcaagattgatcaacccttgctgctgatcgacctgagcagcgatgtttttggtcaaggaaacgaacccgcgctggcgatctcatgggctagaaaggtcatttctgtggcgccgcagtgatgctagcgacggactccatcctgattaccctaagccgatccgttcgctaggctaactctgaacttgttacgaaccggatgtgaagcgtgaatcagggtatgtatccaaaatggtcgatggttcatgattgatggatcaatttcgggtgaaacatgaggagccccttttgacggtatgggcgtactatggaatggattgacaaggagttttgcgtagacgatcgtgtgcatgagatcctacgaccacgacatttggttgacagcagagatctgaatcacttttgcctgtgctggacgactattatggcagttcgatctcttgatggtcgcgggcgggggatctatcgaaccggttgatcggttatttgcgtgcgtgcggatcggccgaaggcgggagcgtgactcgtttggaatttgaccttggacttgtggggaaccatgatcaagggggggaagggggccatggaggagggatacgggggatagaggtcaaacgacatgggataatgtagaggtcattcgaaagaggatctacctagttacatacacaaggaagatccgtcaaagccaaatcttggatatagtctaatacgagccaatctgcgcgatacagacaagcacccgcgggaaacactgaaaccggcactgtcagacaatattgttcacctgctctgccgacaaccaaccatcagtgacgccgattctcacaagatacaagcaaggcgctcacagcaactgacagcatgtcaagattcgtcatgagcaattcgctcgtggacaagattcaccattatgcgtcgtttccgcagacgggtgtcagtctacaggtgagctcaaccccctctacaaggatcggtccggatctcggctcagactgacgtcatttgcgctgatcttgcgatagcaactcgtcaagtttggccagcacccaaatcaaggaactctcctgaatgcaggtaggtactgaattttgtttacttgcgataaaatctcccgctaaatgacctctcggtgcgttctcctgaaacagctgcgttccttcgcgaggaacttgctattcgactgtcacatcgggtacgagacctacaagagctcccggacggactaagcgagatggaaaacgtcaaattggtgcgcggctggtacgcagagtctttcgatgagcttgtcaagtaagccaagagttatcactgcaagcggctgatatcgatccctcccgagctgaacaccgttcttgcggaccgtccagattccccggcctcggcagtctgagcttgaatggagaattgagatcgctcttgtcgggaggagcaaaaaggtcagtgtctcgttcagatctttgcactcgcaggtcgcgcagagtctgacctgtagaccgcggtaagcagtagcaagcagatcaactttccctcgtccacgccaaatctcgccgatccaaaatgggcctcgacatcatcgatgggcaacactggaatcggcaacggtaacacaagcaagctgagaataccgatcgaacggaggtacgagctgctttcctgactgattacaaccggtagccgtgtcctgacagggctacctttccgaacgcactcacagatatttctccccgcctccggcccaccttgcttacccaccagaagtgcatgaatacaatgacaagtttacccaactactacagcgtatcaagcaacgacacgatcccactgtgacaaccatcgcccagggtgtgctcgagtggaaaaagaagatcggaggggatgttatgggcagggatgtacagggcttcttggacaggttctatatgagtcggtgagtcgtcaacgcaataattcctgcatcgttcccgcttacgcagatgtcgccgtgtctatgaacccagaattggaattcggttccttatcggtcaacgtgagcatgcgttctggccgttctcgttgagaatgactgatcagggcgaaaatgtcactgttcatagatattgcgctgaacacgctacaacctcatcctggtgagtttagtcgtcaaaatttggcattttcaacggcggctgatatgcccctcgtccgtccagactacgttggtatcatttgcacgagaacaaacgtgcaagacgtctgtcacgaagccatcgagaatgcaagattcgtctgtgaagagcactatgcactgtataaaggccctcctatccagctcctctgcccaagagacctacatttcccttatgtaccgggacatctgtaagccccaccggttgcagctgtgagaaacttgtcgcctgacctcttcatcgctcgcagtgctcatattctcttcgagttactgaagaactctctccgagccgtagtcgaacggcatggggtggagaacgaggacgacttccctcccatcaaagtggtcgtagtggaaggaaaggaggatttgacaatcaagatttcggacgagggaggcggaatccctagatcagctgtgagtcgtatacagcccctgttctcgggtgctagacagctcagctgatagtgagactaccttcagatgcctcaaatttggacatacatgtacacgacaatgtcggagacgcaagacatggaggctgtggcccagaacgacttcaaggctcctatggccggtttcggttacggtcttccgctgtccagattatacgctcgctttttcggtggtgacatgagactgatctcgatggagggttatggaacaggtaagttccgacatgcttcaaaccgctagacgcttctgacctcatatcgatgactcgcacagacgcttatatccatctcaataaattgtcatcatcacgtgagtatggcgcggtatctatgcgcatgtcgatcttcggctgattccgcgtcttgggccgtatctatcaggtgaacctctacagtagagttgtacttaccgatatagtcatgcgacacaccaagctcaatacaactggccttccatctgaaacccagaggagctgtttcagctcttacatctgaaacgtaacgaattgacatcctttcattttgtgcttcaagtttagagatgtctcggagagcttgtttactctcactggaggccaagacgagagcaaatcgtcaaaagcgcactgccttctttctgtcatatgcattcagctcgcttacctctgtatcgactctcagtcaaaatggctgcggcgacctcggatactggcagcctattgggaacagactctggctatggctctggtggtgggtcgcttgtttcgagaatcccatctctggatagcgacgagggtttctcagcctcggaaaaaaaccgcataaaccgtcgagcggagacgatacgcttagcagacgagggattctaccgagaaaattacaaagttactcccgtcgataatgacgagattctcggcacagctattgttagagccagaatcgaactcagtcaagcttgggagaaacatttatctatccggactcagcagaattgcggctggtccgtagtggagggaacggagccgataactgtctacagtcacctggcgtcgagcacccgcagagccggtacggacggcagcgagacggcctcgcaagcggtgactactctggcgagtgaaagtactgttggtacaccttcacctgtatcatctctgccgccgggtgtcactcgtcttgatgacgagctatctgcttcgcgtccttcctctccgccagaaagcttgaaccccaaagtttcggtcaggattggcttaggaggtagctcagatgggagtttggtagaccagacgcccagcgatcttgtcaaacccatacatcccagcgatacccatcagaagcacttgcgttcgatcgattcggcagtcgatctgctctacccctattgccgtggagatggtcggaaatacgggcggccgggaccaagggataccttcagggagaatctgactcatcgtcttcgaaatatccagtggcggctgaggggatacccacgcttacctcgtccggttaatggccacttggtgtcttcggtaccttcagcttcgacagaagagtcttttcgcgccaccagcactcagttgcgttccagtagtgactgggatcccgttctgacatccacaatgaggtccactaccgggatcggcgagacatcgacgtcctcacaaagaagctcatcgaaacccccgcctgatggacgttccagcgacgaccacgtcgagagaccccggggaaacacaagccgatccaggcgaatcattaaacggatcacgagcaggccggtctcgggacgtcgcagggcgttttgggcaaagttccgccccaagcgatgatccgcggcatcattcaccagattgaatgcatctcgacgcctgcgacgatcttgcgaagcgagcctcgagcttgaacagagttatgagagagaacttgcttaatagaggcaagacaacgctccgtgctcatctgccctgtggcgtctagtcgactttctctgctctagatctaaagcatcgtacgagcttcgtgtgagaactcccatgatgatcgaagctgacggactccgatccacattcgacctagcgcgcccagcaacacatatagctcggcatctgatgagctgatacgttgccacaggtggagttgtaccgtcacagctgtgggcttgtagtgcgattctgcgagacaaatgcttacgtgctttgctagtccgctgtgcattattctgcattctcgctcctctctctgccagtctatgtaacatggccgttgcgccagtaagcctctgtcgctggagtttgtactcggtcacgcattcctgtacagtcgaaagcatgcaagcgggagtcgcaacagttgtagttttgagtgcgcaggtgagccccatcacataacatccaccaaacggcgaacctgatgaacagaaagcatagcgctgtgtcttccagaacaactgacatcctgtcatatggaatatcgtgcgaagatgggcagtgtggaagaggggcttagccgcacataaaacatccctgcgggacgttatatctcgacgagcttgatgagagcaaaagcgaaatcaaacggtaagcttttcaaaggtacatgtacagacttctctgaccaagatcatatctgtcgtcccccaccgcagctcaagcggatcctggctcgatcctcaaccctacctatgcacgacgaatgaggaagactctggagcggaagccgactcaggacgaattttgggcaatcgttgaacgatacattttggacacgctactcgagacaggaggcgacaatccgatcacattggaagcagcggtcgaagccgctgttgacgtcgaaacgaccatcgacagcggccattgaatacccgcgatgtcactcgagtacgtagcgccagaatacgtctcttgaagctcatcctcgggctgcgtgagactcatcgagacgaccctctgactgataccgttttcctcctaaagcgatgggccggtatcgcgacaatcttcgagtaccataacggacactgggtcgccgctaggcgggaggacagcgaaactcggctggtgtctctagcttttcccgacgacggcactacaaccatgtgcgggctcggaaagagggtctggctcaacaagcgatgggatgaccagccgtgacttggctcatcctgaaagctgaatgattccgagggctaatggcaatagggtatccaattatgcagcaggttgaatgtgcgaatatctcgagcttcaatgtacaaataacttgttaataaaggcatgacagatggcgatgagaaaggatccactacaagaacaacatatgacgtcaagtgtgagcgacgattccgtagcaatcgggataccagggcacccgactcacaagatgtaatggcatgaaggctgcgatgcaccctgcttagagtcccgttaacatccaggctccgccgacgacgactcccaataatcccaacgaggcgaccttggtatccaagatcattggcgaggtccgaagacccgcattgagtgctcctcctacaggtcccgtattggtcggagagactgggacgcccgtggcaccggtaggagcgacgtagctggaaggtccgacctggatacccggagtgtaagcgatttcttgagtagacgtgctagcaggagtgctagcgctgctgcgcaaagccgatggcataacaatgagcctctgctactgctgtgatgtagttccaatctgagccacaaaggtcaactcacctgctttgcctcttagccagagcttgctcgtggaaaggaccgttctctgccgtggcgagcatggcaaaggcgaggacggcgagggcgatgaagaaacgagcgagttgcatgattgaatggatgaagagcactgcaagtgtcgttgtgagagatatcgccgggtgattagagaggtcggcttggcgatgtatagtcgtgatcgacgtacaaagcacgattgttacgaccatcagagctggaagagatggcgaacctgctggtggctagctagacgatgatgacgagaacgatgataatttgcttccgagttcatggtgactgccgagaacgatgccgagagaccgaagtccggggacagccgggagtagcgcgattctcggttcttcgctttcgtttccgggtcgacgatcaccgggcgaaggatgagctcgttataaccgggggagagagtcagttgggaccatcgagtgttggttatatagagatgtaatggtcattacaggacatcgccaagcaacgttcatctttccgtcaaccgagcctgcacagacctcactcagacagacgaacagaaaccacctgcatacaccatgagcgattctgttattcatgccgtggccggcggtctaggaggtgctgtcagcatggtgagcggtgacccgtcgtctgttggtcaaatgcggacgagttctaactttttttgcggcgatcataccgctacctcctatcatagaccctgacctagtgagcagttcatatctgaatcgtgacctacagcgcccgatcattaagcgaccgaacacgttcgcgccttagcccccttatcgtgcttagcactcgatcagccgttcgagcaaagaagtcgaatgccgtaggtccagccacaccatcggtacagtcaatagtattgagactgatcagagactgctcacataagtcgaccctcgagtcagcgatggagatcctgaaaaaggaaggtctggctgggttatacgctggactcgacagcagtatcgcagggatcgccgtcaccaacaccgtcttctaccttttccgtacgtcgagggaagtctcgagaagctcttgacgatctcattgactttgatgggtacatgtcacagtcgaggaatccaagcgtttcattctcggtcgttcgggtaacaagaagacttctactgctcagatgatgttggccagtaccattgcaggtgagttcaagctgtgacgctcacctaaggtcggacgcatgcagaatattcattcccgaccgctggtatcaggtgccgctacgactatcacaacgaatcccatctggttgatccagacgcatcaggccactcgaggcatagttgaagtgcgtggcccacaacatctggctcgagcggacgtgattgacctgaccaaattcggataatagcaagatccagctcatggcgaccgaaaagtgatcaagaagaaacccggtatgctagaagccgcacgtgaaatcatcggggagaagggtatcaccgtgagtgaatcggtctgtagatcgtcacgctgccgggaccgcgcttatcgcgatacacattgccaggcgctgtggagaggaatcgggcctgccttggtattggtgatcaacccagttctgcaggtatgcctaaattgcgtcagttgacgctcgcatacgtctgagtattttcatcgctgccagtacactgctttcgagcggctcgtccagatctatcaacgctatcagaccaagaagaccggtgtgcaatctcccctgagagatatcgatatcttctggctcggtgcagtagccaaagccatcgcaaccggtgggacgtatccatacgtaaggcaatccccgtggaaaaagcaacgtcgaggctctctaacactcttattccttgtagatcgtggtcaagagtcgtctcgtaagctcgtctgtctgtcgagtcgcgaggatcttctgacagtctggcggccgttcgtagcaagccgcgacccatcaatacggttcttcggtccaagcgatcttgcagatcttgcgggaagaaggattgagcggcaagtcgggttggccaagccgtatgaaacaacccgagagctgatcgctgcccatgtgcatcgcaaacaggtctttacgccggtatcggaaccaagctgctccagtccgtcttgacagcctcgtttctctttgttgcccagcgtagaattttcgagctggtaaaactggtaagggcctgattgtgtccaatgcgaaggccgaggagcgtgctgacgccggagtgattcgccagttgattgcgtctcgaatggcccgcaacgccagagcagtttcctagccgttctccctagactggtattatattgtggtgtcggcgtgccggtcctcgatacagattcattcgatgcgtcgtgacatgtcgttagcgaaaactattcttgtacaagcttgcaatcgcttaaatattggcccacagcccaaagacacccttgccgtattgcacgatctcccctccgctgagcttgctgtcaccgtaaatcctgtcgacgaaagtgataggaacctctccgatgttatacccaagcgatctggcgcgcgctatcatctccatctgaaaaacgtagcctttggactgtgtaaccgaaatgatgtggcggagcaccgggagtcgatacagtctagaggcagtcgatcccggttaggcagttgcgtggtgaccacaaaaggggtggaactcaccggaagcttcctgtcagatcagtgacaccgagtccgagaacggtctctgccaaaaagttggctcctcggctgacgagcttgcgcttgagatcccaaccatagacgcctccagctccgaagccgatccgctgcgtggacagcggtctcgtggacgctgatggtgccggtcgaattgaagcagaatagcgggttcccgtaacaatgtccaggttatgaaggtgctgcagcctagaattcgcatcatcaaaaggtctcagttctcgaatagctccagggcgcctagcatgatcactcacttgatgaattctgggatgaacttcggctgtacagcagaagaccaggcggtgagctttagctgacatcagccgacctgcctagtgaacgtacgtgatgactgaagtcagcatccataatgataacaaagttgccagtgcagaagtccagtccatgaacgtaagccgtgctgtagaatttgattggggttagctgcagacagaaccgcggtttcgaggccatgagcacgcacccaaggcccagcttgccagctctgggtctgagcaggactttatcctcgccatacagattggctagctgcttcgcaacctcttgagtgccgtccggagaagcatcatcaacgatgataatttcccattccagtccgctgtaatcgggcagaaagggacgacctgtcagatcctggtcaggtcgtgtcggaatcgaacgaggcctacttttcgcggaaagttttggcaagtagccagacaatgatgggcaagttcttgcgctcgttataggtcgggagaatgaccgaatatttgttctcggctatgtcaagataacagatttgcacgtatgagatcgtgtgatacgcccagtgatgcccgaagacaaaaggaacttacctcccagagccgcgttgatggatgtcgaaggcatgtctataatgtgggacatgtaaacagctatattccctggctactattttgtgttagctgcctggcaaacgaatgtggtcaagaagtcaccagaggtgatcggacgggctgaggtctgttacgttgtgaaactgagtctgatacacacatattgcagggttcaggcagctgcaggcagtcaagatcaaccacgacctggctctgggtgttcaatatggttcggatgcagagggtcagggaattacgcaactatgccgtgatgctcatgatgcttcccctgcatggccttagtgacacacccctctgttcctgcggatccggtcgatgacgttttccccctggctcaccaggagggagcgcgggggagtgatccacacagacgaggcgacgacgataaccgggggcttccgggggcgcggaagagataaagttctgaacgtgatcgtgagagagataaagtacactcactcacctccgaatacgctggtagatagtcggactgcgaattcggactggagaaggaaaagcataacatcgatctttgacaatagcagatagctactcttccattgtcatcctaactatcctacttccaccttgactcgattcgaggacccatagctatacactcttcacaaccaaacttgacaagatgattgctgaatttgaaggagattcgacccagctcgccgagcctgttgacaagcagacacacgagagtcccgtttccaactcgacggatctcaagatcgtccataggttgggagagatccctctcgtcgctgatggcctcgttacttttgagtgagtgtctttgcgttgcgtttcgccggagaagcagctggagtgctaatccgtttaggggatcagggctgtgatcaatgccaaccaattcaccgcttcgttgtatcagaccgcgactggtatcgctgcgagtaagctcggattgtattcgaggcatctcactttccgactgcttacggtggtcgcgtcaacagaatctctagacatggcttcccctgttatcaaccgcactcagccgttgatcgccaaggccgatggcttggctaatcaagggtgagaagacacatcttcacgcatacactatcatctgtacactgttcgctgacaaggtctttactcttctgctatcagattggacatggtcgaggcacgattcccttgtaagattatggcagtgaggccttcaacacagaagaacctgacaaattattctgcaccagacgcgttcaaagcgacgaccaacgagatcgtttcgaacgctaagggtatgtatgaccaggtatgtactgagatgagggcgatgctggcggtgtcggactgacggacgagtacgctcctggtctcagcgagttgtgcatctgcttcctaacgaagtagtcaagcgggtcatcgatcagatttacgagttgaaagacgcaagtccgactggacggtctcgccatggtcatgcactaatacttttgttggattctttgatctgccagaggctcgctgccactggtcaagcagctaccggccaggttcactccatttccactggaattgccgaacagctccacaaattggctcagcatgccgagatccccgctagcacgaaagaggtaagtacctgatttcagggtcaggtcatgccgaagtttcaagagagctttgaccgaccctacgatggctcgatcaggctttgaccgcggcgtacggtgacatcaaggatatcgtgggcaaagaggattcgtccgcgcaagggaaggccagcgagatcctgcactacgtccaggtaagttcaggcgccttttctatattcttcaacgcagcagaaattgagattgggacgtcgttcgtgaccgcactccaggccaaagttcagcctgaattggacaggttgaccaactccgttttcaagcaaaaggaaaaggtgagattttcaggcaagtttaatttcaggatgttgacctgatcccccatctcaaagcctcatgcggtcgagcctgaggtcactccctgattggcagccgactcattcagcaagatcgttcgactatcggctgtttcccgttcttgaattatagaagtagatgtgagattgaagctcatagacgatatagaaccgctcccgttaagcctttcacctttgttgtgagaactagacaaatgatatgcaaaagtgaactcagatatttcagacgagtagccccagagatgccagcctcaagattgcagtgtcaggtcggggtggagtattcagagccgtggatccaatgactgtgaatgcatagagataaaggtcgtgaagtcgatctgtccactactgatcgactgtgttcaagatgcaaggtacaggtcgaggggcagagatacagacctgaagctcgggccatgtaagtggtgaattcatgtccgctatacctatatagaagtgaactatcgcttgccaatcttaaaaggggaaacagtcagacagggccggatcgatcataattgattctgagccacatctgagccacagcttaagctattcatttcccccctagcaccggtgatatatgctcaccttgaccatctcgtcacaagaatggttcgcggatgcagagctacaataataatgctagactgttcaggggaaattcgcacgaaacaagggcgaacaaaaagttaacctaagatcccagaaaagggtaaaagatctggaagatcacttttgtacgctttacttcgttctttgagcttttttcagagcttgactgctaaaatttgacgttgcatgccaattaaaatgctgataccaagtctttatttggtggcaagtatgtgcactgaaatggacctaggaagtagtctatgtaaaagaggttttttttttttttttttcagtcgtgatatggtatcaaggtactttaggcatctgttgttgcttatggaggacgactcctaactttgctcccattctggtcacctctttctccaatggcaaaattttatccttgacatgtatgggtatggatggggcaggatacaggtgactggcatttctggaatttttgcttcatactctatttatcttgttacatacatggcatctggccctgccttcagagtccaatcaatatattcggccatgcaacaactctgaccagtctcttagaggttagctacctctgttttcttgccttcttagcttaaaagagttcaataatcctacattggccaagaagtcgttgagacagctgcagatagaacaataataatggttagtttgtcgatgggctgattctttatgagtacttttgcaactttttctctgtcacttcattgtgagaggaaccaattcttccaccttttaaccacgggcacttcagtcactccattcaatgacatgtagggacaacatggctgggccggcttcatgaacctagcaagatcgaaatcgagtgagggtcggacccaaaggagtcagctgactatcgtctcttcaaaactttggagaaactatggcaacttttagaacatgaatattgactctgtcaagctacttagcacaggagctgtatccttgttcattcaccatgagactccaatatttgatgtcacctgacgtgtgtaatgtctaccttacaatcactacatcagttgaatagttgtgatttatggatctatatctatgattccaccagttcttgctggtgatttgctggtaccaacaggtcagcctatacttgtagtcctgtgactgaaaaatactgtagtgatttgctagtaacagcaattggtgcctacaaaagattgtgtcaccagatccgtttgtcatgagaccttacttagaaactatgccaccgcacaccccagactagaatacatgttagcaagattgacgatacacctgactctgacgcccttagccagattgtgcaacgatttctagatctttaaagcatagttcacgtggtcaaaactaccattgcatgattgagacaagacaacttcgataatggcaatgacttagccagactaagcatagcatccactcacctacatagctggggaacagtattctaagccctattaacttcagggcaagtagagctctggttaccagtcttgtagtatctaactacaatactgttcaacattaggctgccagcaacataggattcacttgtagcgggagctagtgtataatgaagtgtgctttagatgcagtacgtagcataaaagagaggtatagcaatacagtatataatactacagcaatgcgtacccctccaagggaggtctctctgactggtgttattcaggtatctgtacggaaagccccccatcgatgcgtactgcagatggctacaacactcaaagccttattcttgtcaggatttgcttgcaagaaacacgaagacatggaccattggttgaaagtgatgttcctcttggcattttcaaattgcattgacatggaagtctatagcgactgcctttgagcctagcgagatcatgatctggcaaattcagttagacatagaaaggaaactcctgattcgctgtagtcagtggccatcagaactcaggattgcgtttcatctgccaaactacaggtacgatctcaaatgcttcaggtcaataaaattacaagtgagtgtttttgggacaggcaggcactgcaacatcagatttgcccgtaggaactttcggaagaaatttcattgaagatatactggaaggcatcttcaatattccaaaagttaccgctcatgccgtaggcgacaggtcacccccaggggcgctctgtatgatgcaccagaggtagtgtccaaggggatgtcctgtgcaaaagtctgtctgttgacgtcctattttactatactgtcatggatgccttaggcatctggcaatacttatacatgatgacccccaccttggctcctctcccacttacttctccagtggaacctttcaccctaacactaaacctgttgtagcgcattacatgtcctctgtgaaacgtctatgaactgcatgtttggaggccactcttggagcacccacctggagcaacctgttgggagatatcaagaagacatgtttgtaatagtggtctctatcttgtattgttataatttctacatctgtcatcaacttatctagctctaccccacacttgtgcctcacctctacaacacatcccaaaaggctatcttcaagatggccccaaccggacctccttgatgcctaacaacacccttcattgaagctagtcttgaagctgttactgcagcagaaggcattccctgtatcccgtcatcacagagacaacttgatgctgatccacacgattgctctgcatcaccctgccctatgtacgttggctccgaagttgcagactggtagggaaaagtatacaggagggtaagaggtatcgctggcaagctgaagagcaagaagatatacaaagtaatccaacaaaggcacttctcatgagacggtgttctggatcttcatgtcgggagaaactctcttgccatactgagcagcccagaaagcaaaaaatattccaagcggcagctactctagggatctagggtaaggctccgatttctgccatttgtgtgggtaataagctagtacaaaaaacgcatgcgcaatataggtaagtgcagttgatcgatcaactccactcacacaaactaaatccctaaagtcacaagaccagaagattactttagctttgggcatgatggaaaatatggacctccatttgaattcaaatagagggtcagcggttgccttcttgttggcactgctagacacatgggtacatatatcgccttatcacggcaattgatactaagtttatactctataggatccacacaagcattctagctatcgagttgcatgacacgcacccaaatcagattcacaaatcattatatacagtggttatttgaaccatcacacggaacgattgggcaagattgcttgggcaacactatcattccgtacaaacatacaatattcagatcatgagagacatgacgagtcccacgtagacattgataaactatttcctataagatcgctgtgtcttgtcctactcagcccaaacattgttgctttgtacctgtcctgatcatcacctgtgcagtaattagatctgtcgagagactggagcagcgcccaacataaggtctaaagtcaacggatttggagacaacaatctgctgatcgaatgaatggacaagaatgtcaactggatagtaacacaaaaggtcttactggaggtgcatgaacaaggctacatcacccaagatgcagcaaaccgacttggggcttgagatcctagagatacagggttgcaagaatatgggggtatatacatccacatcaccacgactcgtcttgccagtggtgataccattactaggatctatgtaggctctgtcagagccggtatcatgtcgtttgtagcagagggtgagtctcgacccttgattacaagagccaatagaacatgtgacaatctagagcagcgcacctgaatgctccgcactactaccggaatccatcagggtctcttgcggaaagcaaaactcaacctaaaggacggctttgaatcaaaaatcgcccaagaacggccttgttcgagcacatggccgcggcagtgattgatgaatggatccagcatatgttcgaattcatagcaacagagaccgaggcgggataaaggctggtgggggggcatgcagtgaggacacgtccatgtcctgagaggaatctggagggtagcaagaaaagcgggagccacagtcatttcttgggtgacgagaaaaatgatgatgtgaacaaggcgagtgcccgaccagggatcggaaactcacacgatcatttagcgagatccgtgacaaattgcctagatcttgatacacgctatcattggtgggatgacaaccagaaattatacacctgcctcgcccggatctaagccttgtccaatcgaaactttgttgaagattggcatgctatgacatcataggtgatgctcagggtgcaatctcaagcacaaagggtcaacatgtgactaggatcacatgttgtgactggagccacacatctgtgactggagtcacgcttatgcaactggagttgcacatcagtgactcatttgcgactcatttgcgactcatttgcgactggagttgcacttatgcgtctgagtcgcaaatttgcgacaagcctagtcgcaagtacactggcaggacatgctcatcagaatagtatatataggagaccatctggacctcatttcctttccctctaccatatactactttagttttatataagcaacattgataccccttcacaacaaggcaagatcagcactagcaatagaccattgctattgcctagactcagcaagtgaccaatctttgtggatctagttgttacttcacaataacactgtcatagtccagccattcctgtttcttccctatctttgcttcaccttacataccatttgctgggttgattgctcttgcttgctctgtactttccatctacccatttcacatcactgacactttcattgagtctttgaagttccgtttgctacctttgcttgtggcactttgcataccaaactgcttcattatgcagcacagattcactacttgaatgcaattacagaccagttcagaatctgcatttcttattttcacctgatcagaatcgacacctttcatcattacaaaaagataccattgcctacggaaaacgaggtatccacaagatctacaacacggtggcaagaatctgatgctggctttctacaaccggcccatatttgtacaggatgtcaggtatggcctcagattgttctttccttggcagcaagataaggatgctgttgttgctgttgttactagtaaatcactatcgctgttctacagtcatagaagtacaagtataggctcacctgttgtcactagtaaatcactactagcaacaactggtgtcattatagatatagatctattgaatcaaaacgacttgactgatgtagaagaggcgagagacgcgatacgcgtgtcacgtgacagacgcgaataatatcaccaggaaactgatatggccctggggttacctctgaagcgtggcaagacgcccaccttgggcatgctggccctctccttacctccggagtcatgttatcatcttgacagcggagaatcagctcgccgaaggaaacaaaagagcccaactgtagccagctgctcgacagataaagcagcctccacagcttgaaggtcttgaggtcttgctgttaagctcatggcgttccaataggcattgtctctagctgggactttggtgtcacttatatgttttgaacctcaggtctttggcaggcttggtaccagaaagtcaacctccttgctatcttccttgacttgtatgattcgggatcatggtgaaggtaatttattgatccaaaacagacaactgcagttgacggtctttggcacttgaatttgcttgtaacaacacttttatccgcccaccagaataaacctttcttgagtttcatctggggtagcatcctagactgctacgaccacttggtaccataaagtgtccgaaggttccagggctagagaattttgtcgattacaagcattgctggagaatacagtgatagtgcacaacaaaaccagacatccaagatgaaaaaaaggcagacagccttctctgttgtgtcagataggtcacaatgtcatccttagtaacaatctgaaaaggtcacacttcattccttcatgctctcggctgcaagaacttgactcacaaatcacaccttggagttaccaagacatagcaaggcgcatctgaacaccgacaagagacctgaagcccagttgaaggttcaagacactcccacaacagctaggagctcttgaatttccgatatttgtgtatgaccgattcaaatgggttagccaagcatctcacacaattcgcccttgagcaatactctacacaacttggaacctctagacagtcactccagagcaccactagaggaaatttctgactgcatcatcaaaataggtacaccacattatcagataatgttatattgcctcaaaatcatccacctgacaatatgatgagtagcaccaaggctcatgccataaaggtcccaagcagactgttccagccaaggtgtaacattgacctgttactgttacagctcaggctgtaggcagggggccaccccgaggggcgcgtcacgttccgcaccggagaaggcgtccaaggggatgccccgagtgaaagtccgtctgttgatgttctactgtactacagtgctacagatgccttaggcatccgttattacttatatacaatgacccctacctccgcccctctcccgcttactgctccagtgggaccttctgatggaacccgccaccctaacagttaccagcaattcataagcgagctttgggtatggcacatgatcggctgcatttggtacacaggtctcaatgacatagagggtagggtgtattggtgaagacacatgtgaaaagcaatggtaaggtatgtgtgatagggtgacacatatgttgtatgagtcatggtgttgtgcattgctgtaagcttgcttgctgtcctgttggtgattgtttgcaatctcttccaacacgtaccttgctagaatgacaaggtagggcatatgtcaattgtgatgactaggcttgaattagctagagataccagctgtctacactctagctgatttgcatacctatagatatatacattctgtgacatacagaatcattccgcaatatcccgcgcagttgcactattctgtagcggcccgtatcgtatatagcggtcctcactcaatgccaatagcagacattgcccctatctctgcaacagcctaggtcaactacaaaacccaatatagagcaggactggacaaccttgcacaacgaaccatcgaagtaaagtcaccgcagagtctgactgtacaatggcccgtcagggggtgaactggatctgccaatgttaaagtgcttgatgaaatgtgactcgatagctaggaacgtaaatagacccctatagagtacgatcactgtgttattcaatactgtgatagatcaactcatccgtccaacaggcagacatcgtctactaggtaaaaccttagggggagtgatcacctccataatgcctctagttatacctagcatagttggcattgcatttgtaaatatactgttctggatacacatcaccgttgtattgtcaggagaaggctctgtcacacgagtcacaggctgccatctctccaaccttttgacacaacaagacggtgcagttcagcttacttagcacctgaagacttaaatgtagcattttcaacagatccccaaccatctttccgcattacactcatctgtccagtctgtcttatacgcatgagtccatttatcacagtcttcaaatacaaattctgtactctatgggggtctatctacgctttctagctattgagtcacgcaacagtctgtaggttctctcgtaagtctgtaactattctcttatagtttgtaggtaatcataagattgatcctaatctggtgatgtcatgacccagtcatttcttggactatcttggctccgcctttggcgctattcgttggatcacttactcccgcttgctccatgtctcatatctatttggttcatgacacctacacatttgttacccctttggagttccgctcgtaggctttgctaccgagctccaccaatcacaccatcctactttatttcaaatacctcttttaggagataagagaccaaacccaccaatgggctttgtctctgactttgctccaaaatacttcaacatatatatacaattccagatcacactcctttgtactttctcagagaagtttccctctcaggaaactactaccatatgtcacttctttctgaaatctattgacaaggcttgtaccgcatatccagttcctcgcttgacaccttgtcactatatgtcaatagtgtcgattgactagtctacagggcagacttcacaaaccaatttgtttgccaagtcaactcgttcctctcgcctctcctattgtccgtttggtcctcttctttggcccgagcgtaacaggggaggacctgtttgagatattctaaatatattcataccaaatgggcaaagcttgtctagagttgctatggaccgaactcagctggagagattctacccaatgtccagagcgctgctgtggtgttagcaataccaggcctgtcagggatataccaaacgttctttcatccttctctctatggaacatattatggctcatagcataatgctgatattgcttgcgaagcttgtaagcttgtgacattatgtcagattgcccagcttctattagagtggaagatcgcctggggcgattccaacagagaaatgatgacttacgacatgctccccccagctatcctgttatgctgatggtcaaatcgaccttcccgtagatgataattgtagggttgtgcttcagcgagcgctagcatttgcatctgacgatggctgcaggtagctaagtgccgataagcgtccatgcttgagtgatttttcgaaaggaacgggctcatgcaggctgattccgggcaccgatagtctaaactaccaccatgttcaagccctcttacaggcaaaacgaaccaaagcgcccacggttgacgcatatgtgtacggttcatgaagaccgttcgagacaagacatgtgcacattgaccaaagcgattactcagttcgtcgaagacaatctgctgaaacttcgatatccagctgaatatcaatcgttatcggtccaaaacagctacaagccaaaatcgcgttcaatcgcttcattacattggcatctgtatcgttgcatgtcgttaaggtgccaataggcatatgcttcatttaaaggtcggtggtcttgcttgctgagacggcgcgtgcgatcgaagtgctgacaaacggatgagaatccgtcgagcagcgagccaatcgccacggcttcgagctgctctcacaagcagtctacccagcggtttgacatgtctgtcatacgagatgggcgcggtcttgtcgagggttgcgccggacgcagagttcgacagctccgtggagctttcacgtcgcctttgtgaaaccaattcatcgagcgtgacatggtccagtaccgaatgcagcgactgagcgatccttgtgttgcttgtaagacctctgggcaagataggtgaagagtgggttggcgcttcgagactacgcagccagcatttgagggcaatgttggcggtgactctatcaggtcggaacccccgttgcttgtgttgatttatgagggcgaacaagcgagagacttgatgaccaccggccgatgggcgcattcgagagctggcaggggaagcctcttgttcaggcggacggcccttgcgaacccttcgccctgctgcagtgatcgaacctgtcctcaagaatgccgacaactcgctgttgacaacgtggttgatcggtactcgcgcagggacaacgaccctgtcagcagaccgcactgcatcaagccgtctcatagatcccgcgcgcagatcctcatgaattgcgtcgagaaccttgtccttgggtggcaatgttccttgacccacgacacatcgacggtgaagattttcccactgcgttccccgtgtgtaacctttcgggggcatcccaagcctggcaaccatgtcggtgagaccgagatccctcagcgtcggctttgcacccagccggccgattgaacgccgcatgcctgttttgcgcacagcatgctctaacatggtcgtccgtatataatctaagagaacctcgtcctgccgaagttgaggatctctcaacacctcaaaaataacccatctgaaccgacgatcctctattgcctgggagagctctggacttcgtctaagcaagcgcctgagagcttttcgagagctctttatgctggcttccagagctacacactcgttgtgtgcagctgcagcagtaatgtcatcagcagcggcactctcagcgcggaacgagctggattccgtgtgagaattggggatcactatcgaggtagaatcatcagtaaagtcgaaaccggactaacagcatagtggcattggtcacctgaaagatcgtgctcttgatgttcctttcgtttgaccggatctacacctcgtttcccagtcgtttggtgatgcgaaacgactggtatcacggggtcttgtgcaattcgatccgggccagacgtactggtatcccgccggatcgatggtaggcgactgaacgcgacatgctcaacccttgtgtgcgagggggatttgcagatggagatggtaggttcgactccactttgaactctatctgcaactcgctgagtgttgcagcatcgcttaaacggtacagcccttctcctgtcttctcgtgcgtcctcggatggaaccgagaatatccgtgagcgagggaatgagaggagcaggtcccttgtacaagacaagctctttttcatgtcccagccctgcccatacccgtcctgtgatatagaatgtcggaaatttcatgaactgcgtggatgcgattcgtgtggtcgagtgcttaccctacgagattggctggagcgcaccgtcctgtcctgtgtcacggcgctgacgagcaaatcgatagtacaaaggagcagccaggctcgagcgatcccttcgtccgtgtcggtttggatactactatcgtagggagactagtttagctaagaactgcaagtctcagatttctgaggctcgtagcttcatctagcgttccacgggcgaggatcgtaagtgcaagcatttgaccaattgttccgaattattgcacaacatggatggcacggaacctgcaaccagaatgctgcatgatcctagattgttggcgcgtcgcgcttctttcgtgaacgaacacctggtcattctcgtcaccgttacggtatttaatttgacgtaagcgcgctgtcgtccctctcaaagtatccgcggtacgatgtctacttcatctgtctcccctctcgcccggcctcgaaccgaggttggcgtgtgtttgtgtctgtctgtctgtctatgtggctgggtgtttgctggatctcgcgctcatgacctcccggccgcagcttctttccctctggctggcggggaactggccttgcttcgagttcgaagacttttgatccaagttgaactccaacctcaactgcaaaatttgggtgtgccgggagattggtctgatcgtgaaatatctgtagtccctgcctttccaacgagcattatcgcccttgagctccgagcacagcgttcccgacctatcgtgacgtgcaattttccgcgtcgcgcaaacatcatcgctgtcgtcgcccttgtccacccgacaacaccatcacactcaacaactacgttttcaccgcatctctctggtatcatttcgaccgcctgatcagaccaccacatacatacacacaaaggcctgctctatcacatacacacacccaccaaatcccgagcctgtcgtacccaccgaattagaacgaggcaatcaggaggatcttatctggtcgagaacgtccattagtctctcaacgtaaccgcagtacttatcgtaagtccactacactcctctttacagaggaacgacggtgtccggtatgacgagcgattgacgcacttgacatctccccgatttctcctatgctcgcattgcgtttgcggtacatctcgctccggccatgactgactaatcgactccggcaatttcgcaataatcaatgcatgaaccgttctgtttcctatcggcttccgccatgaccccccgttggaaacatcgccatcgacaatatgccgtcactttcacccaacgcaattatatcctggttctgccacataacgccgtgccatgcctcgtctatcacgcgcccaatcctttcgattcgggcaaatcgcggctctcacaaacgattctttcgcgaaacctcatcccaattgggccttgggcgtttctctttccagtcttcagtcacaagctgcactatggccgatgcctctgcagaagtggacttggactcggtcattgaccgtttgttggaaggttagtttgatttcgcgtgactagctgtcctttgagctggagctcagcacttgctactcatagtacgagggaaccgaccgggcaagccggtgaatctgtccgagtacgagatcaagtttctttgcacaaaggctcgggagattttcattgcgcaacccatcttgctggaattggaggctcccatcaaaatctgtggagacattcacgggcaatattatgacctgctgagactctttgagtacggtggtttcccaccagaagcgaactacttgttcttgggagactacgtagaccgtggaaagcaaagcttggagacgatctgcctcctgctggcctacaaggtacgctcattatttcggcctggtactgcctgatctaaccatacctactgccagatcaaataccccgaaaacttcttcatcttgcgaggtaaccacgaatgtgctagtatcaacaggatctacggcttctatgatgaatgcgagtcgcaagctatcaaatgctcttgcttcgagatgctaatgtgtcggcctccatgttttcgtaggcaaacgacgatacaacatcaagctctggaagaccttcaccgactgtttcaactgtcttcctattgctgccataatcgatgagaagatcttcactatgcacgggggcctcgtaagttcgcggcatcacacacattgatcgcaacgctcatactgctacccggaaaacagagtcccgatctgcagagtatggaacagattcgaagggttatgcgacctaccgacgttcccgataccggactgctttgcgatcttctgtggtcggatcctgacaaggacatcacgggctggagcgagaacgatcgaggtgtcaggtcagtcgctcccgtctcgccctgagaaaccgcttatgctgactttcggcgcaaacgcaatcacagcttcacattcgggagcgatgtggtctcgcggttcttagcaaaacacgacatggatttgatttgtcgtgcacaccaggtctgtgacctttttcctggatcacttttgttggtttcacgtctgattcttgatcgtgcatcataggtcgtggaggacggatatgaattctttgccaagcggcaactcgttaccctgttttccgcacccaactattgtggcgaggtcagtccacaccagcgcaaactcccatgcgcaaccagttgatcgaaacaaacgtcttgtgcagtttgataatgctggagctatgatgagtgtagacgacacgctcctctgctctttccaagtgagattatctcgattgttctgtcgaaggtcgcatgtagctgagcgtaacatcatcgtctagattctgaaaccagcggagaagcgcgcgcctaaatacggaataggcggaggtgagtctctagctaaaaccgttctaaatagagtcaatatatcgacatactgacggaatcaaacctcatagtgactcctcctaggaagcagaagaagaaggatggcaagggagcatgagtcgtatgagacgaacacgttttatcggcattttcacgatcatgcaggatgaagacgacgaccgaatgcgatgtttgcctggagcgtcgaatcgtcaaacgatttgcaagaggatgatggtgccgaagagggcaccttgtatatacaacctgggcacgtctagaaacagcttctgcctatggtctacgcgactcttcgggattccagatcttccccaatttccagcctgtttcagccaacgcattcctcaatgtgtaatcacgaatgatgacctcgtatacaaagcccatatcacccgctcatctttaccttggcaccgcgatcatcccatcgtaaaggtagcgcggtcatgccattgcccgtcaatagtttggccgaccgacaaacgtagttgccacgctacaaggcagtctgtcgcagccgagtcgtccaattccctggctgatgtcttccacgtaaatgtctgctgtgatggcagaatcttcgtcaattgtcgacggccgagcatggcaaaagaacgcttcggcgagtcgcgaatagtgaaggcgaagtccacctcgtagagcggcgaggtgttcgcaaatgtgtatacgatctctgcggttctgctcagcatcataaggtaggtaaacgtcacagtaccactgtggtactgaacccagctagtacctgacttacttgtggctagtaccctgtgaggggagatactggacgtccagctgaagcggattatcctcttgggataattcgccgctcaaaacggtagtcagaatctggcgcctgcgggcgttcgtctcctcgtacatggcacgagcggccgctttgtctactttgagtaggttgaccagggccggaagtaacggcgaatgccgtggctgtatcgcaacatcgcagatagccgtgaagccggcaagcgccgcttccttggcttgccataagacagccacgtctgctgtgctcgagcttttcttgtctagaactgctgtggacgtagtggcgtcttctgcttgctgtgcccgccagcagtcccagatctcaggaatcggccagtccatcgcttgatcgacgtattgctgtttggattgatgcaccgcttgagatacagctcggtcgccatcatctccaagaccgaggatgtgactggcattgtgctcagcgattctttgcaatgcaacgatatcactttgttcccgccatgtgagattgacagcgaatattcgcgtctcactgggttgtacatcacattcgctgatttgaggcggttatgagctcgctccttacgattaaaagtcgaatttcgacgtacctgccaacttcgagcgactgagatgaaatttgccaggtcgcgcttgaggcgcaaattccgttgaccgtcaaagctttgggggatttattagcgacctgtgtagcccaaacccgtcaggtctacgttatagtgaatgcaggaaagctcagactcgccgtcaaggtcatctctacagcggtggctgcatcctgagcgtggtcaacctgtatggtgacgtcgagagacggttgcacagcgatcgtatgctgaagggcttgcttcgaaacaacgccgtcctacacaacgatatacgagaggaggtcaatcggacctcatagtggggataaggtttcatgtgctcacaccagcttggtagaagacatcgaaagatacttcgtattcacccggatgtaagaagcaagatcgcaacacgatctcggacgatgtctcggcgtcaagtgtgttggacgtaagatcgagctccgcgataacctgagtcgcaattttgactgcatcatgcgtctgaagaaaggcctgttgccccattccctgtcgcacgaacacggcggcatgatcggatgttacccagaccttagagattggtaccgatccagtgttcgaaaccatcaatttccaacgctcgcaagtgccctggaaggtgtcgttgggtgcatcttgcatcgtggcagagagcctagccttcgacggaatcgatctgacacgaagtgacagatcctcggtgtaatttggcgccagtcggtgccttttctcgctgtgcaggcgtcgcccgcgagatgtcaaggattcgacctgcttgatcaaaccatggaagagatattcgatgtgagtgaattccaaggctgttggagcaccgagggagatcggtatcgatacggttttcgtcgagaggggagggatttcaagctctggtattgtttctatttccagaatgtcttgaacattcaagcttcctttatttgatgaagtgtcgttgatgcgaacaacgatttgggttaatcgcagactagtctcaagcgggttacgcgctgttaatcgaagatgaaaaagttctgcaagacagacacgatccgtcagctagatagcaatgtggcatgcaaacgcaccatcgcgatcgacttaccatccacacctacgacgtgctcatcgcctgtgcagtcatcgacgggcgtctcgtcaatctccaagtcaaagccgtccgcggtcttcaccaagcctcgacctggcataatgattgctgcaccggttgtctggaagacaggcgcatcaagaactgattcgaatacagcgtcttttgcaaagcccggcctggctcttagttgctgtagcgccaagcaacagcgtgagaacgttgctgcacgacgagtgagacatggtgtgtgatcggcgccctaccttgtatgccaaactgaggttctcgagaacaccagattgatcttcctggaccccgcggatgcgtaacattctcaagaagtgctctacggccgaaacactatcgcccattgtatatgcttgccggccaagtgcatattccaggtagtgctgtgcatacgcccatggcgggttttggtctcgatactgttccagtgtacgctgcagacagcgccctgaaagtgctttctgcaaatcgcggaagccccaagtcagacacatgtaacttccaaagacggacgagtacgtacgtgaccagattgctcaaatcgacgcgctgccatgacagaatggaaggcatgctttcttgccagtcgcttgatccccatcagatcggcagaagcagcttgttcgagcagaatcgcgctcgggacgtcctcggtctgtaaatttagttgttatatagcagagagtcagatgatcatgctgatagaagccaagtccacgatgccggctgatagaatttacctgactagcgatcttaaccaagcttcggctggttcccgaccagtctaagcagtcaggatttcggaacgatcgccatgcttcgttgatgagtattcccgccctcatgctatcaatcaccgtctgcggccgagcgaggagagtggtgatacattgatcgagtagcaattccaattccgccagtgcgtgtctgctctgtgtagtttccagctcttctgtagaatatgcgagcatgcccatcaaagtcgacaaacaaaacatttcctacatgaatcgaaaatcatcagttgagcacatcctctgtgccacatactcggcacgatgctcaccgtagcactcgcaaatagcttctgcgcaccgtcttgtaaatagtctttcctgatcgaatcatagacggcagccgctgtacgataatctcgaagcataaaggcgaaatctgcaagcttccgggagacagtctcaggggctgtaggtggataactaccgggaaaaaaatcgaggcattcaaacattagaccagaggccgcgacagcttttcgcaatcatgctcactatcctcgaatcgaattgtataccatgttctgagtgggagttgacctgcctgatccgaaaaactttcgcccagcaccgaataacctcccggtgatgcctcttcgagagctgacgtaaatttcgttccactctcggactctggcttccatccaaggcacaagcgactgagacgtgaattccctgaggaatgatctaatagctgcgacgtcgttcgaagtcatgcaggatgccaaccgtgcagtatcttcgaaaccttccgacaatcgagccgtcgtgcgaccagcggattccacggctgtcgtatcgcgttcgacctcgatgttgtccgtgagtaatacaccgagtctcatgaaaggatcgctcgccaatagactatgcaatgagctacgaaattggcgctcgaggtcgctttgaagccttgtttggctttcttccatgtctccgctttgtatcctggaattgacgaccaacagaccgcaatggggtccaaaagtcttcttgacctgcagcaaagcagcttcagatctgtcaacggaaccatttagtcgcccgtgaatcaattcgatagcattagagaggcgcacctcgtcatatccgatccagaagcagcaacatcatgcacaagtagccagaaacgctgaatggaattgaccgttccatccatatagcctcttgaggtgtagactggggagcttcccgccaccgcgtgcaacttgtgcaagtctctgaccggatcttcagactgagtcgacgcagccagcaagactgcgtggaaagtcagaatgatcatcggctatgttaagcggtccgattgcatactcacaggatactggatgattcaatgtttcgtgctcggcgataggacttgaagcgagaagcacgtctcgcagtacgtcatactgcaagtcttgtactagcgggatatcgatgagccaaccaaccatgtttctgttgaagagcgggcggttgcttacggggatctagctttccgaccagatttgcaatcacatcaacaacgacctccggagaatacggaatggctccgccacctccgttttgcgcttgaagtagtgattcatgcgaaacaaacctcacagcgaaccgtggatgtactgtcggtgtcaagagagacgaaagtatagaaactgcaacaaggtgagcagagttaggccgcctagatatgaaaccgcaatcatcgcccatgcccgatctttatctacctttctccaccgagctttgccaaggtttgaaaagctcgtccaagttcctaactccattcaatctgcaagactgctgaacctgttccgaggagaacacaacgaccttcggtgaaagtgcttgatgtatgaagtcggacatcgagtgtacgccagattccaccgatccctagcgtgtcaggcaaaaatcacgctgggcggcctgctaatagcgcttgcagttattactacgggcgctgcggtattgcgggatgacctatataccgtgttcaagctgatgcgaagccgatcgaaagcgttacaatggtgcgttccttcgacgaacccaagagtccgagggcgactcgcacctctcatctgcatccggtgcacagaaactacatccggtcttcgcagattatcggcatcagaatcttcggaggcggccgtcgtgcaatttcgtgcaaacccgatctgttgcattcctacctagtgattcaactgcaattcgcagcggcttggtctatctggaagaggcctgctagcctgaagatcattcgatcacttagtagaccgatcacgtatcaagaaactcttgaactcggtcattaacggcgccggtcctctgttgatttgattgttataatgccagacttcaagctcgagaatcaggcaagaacatacccttcgaatttcagcttcgatgtttagtctattactcacggacaaatgcttttctatgcagccattcgacttggctttccatcccacagaatcgcttgtctacacttctcttcttacaggcgaggtcaaggcgtttcgatacgacgataatagcggagacatctaccaaggctggactgtcagaccgagcaaaaagtgctgtcgaagtctcgtcgttcagcaggatggaagtaagatatgggctgtaggcaaggcgggtggcatccagtcagtatcaggactccaaagagggttcgaacggtctacttcgccagctagttgatcaacgttgcctgaaacagctgtatagacagcttgagaggaaccgtcattgaggaccgactggatgctcacaggttcgccattcgtcctggctagacggatgtaaaaagctcactccaagttggccaatcaccatcagttcgccgatcaatcgaatcgcaaaccttttcgagaacctatttgctacgggagacgatgacggagtgatcaaggtaagccatgccgctctcgatgtgtgctcccgctcggcgaccaatatcctcgacagctttgggaccatagacaaccccaaatgatcagagaataccctcatcactgggaatatatttcagacttcaccttcttggaagacaagaagcaattggtctccacttcgtgggtggcagagcgcgcttaatgacaaccatttggctggttcactaagcgagtcggtttgctttgataggggcgacggtaccttatctgtcatcgacgtcaggtcaaatactgctactccgctagaacagtcggaggatcaggaagatgagctgctgtctatcgtttccatcaaagggtatggacgttggctggctcccgtgcgcgtcgcatcatcccgctcatgttacaacgtcgtatccctaaatagtggttctaaacacgttgtcggcacacaactcggcgtagtcacagtatgggaccgcacgaaggggtggtcggattcgatcgaccgtatcatggggttcgtccagccatcatgctcaccatggcatgtgcaagtattgatcttcgacctacttctgtcgctagtcatcctcagtctgtagagactctcgttgcgctgacgccggacgtcatcgccaccggatcggaagacgggattattcgcgtcatgcaaattcagccaaacaaattgcgtatgtcatcatgaaaacacgctcgaggaaccctactagactcgtctgatcggttcctcgatgaaatcagttggcgctatcgcgtcccatggtgattttcctatcgaaaggatcaagcttgatcgcaatggcaaattccttggttccgtcagtcatgacgactgtctcaaactcacggacgtctccgaaattctcgaggatagcgacgatgaagacgacgatgccaacgcgaatgtcgtcgaccacgacgacgacgatgctgaaagcgttggtacggttaaaggcaaacaacgtgaaggtacgatgtcggacgccgagtcggacgacgaggaacaggcgtcggacgtctccgatcaaagtgaggatgatgaggacgaacacggtagcactgcaatggatacgagcgatagcgatgacgatgaagatcgcgcggcaattcgtcgggagaagcgtaaagagcgaaagaagctgaagaaagagaaacgtgcaaagactggcctcgtcaagacgaaagagcaggaagaggccgaaaaggcagacaagggttttttcgatgatctgtagaacttatccaggtctcttcttgatgagcaacctgctgtcgtacgggtataattttgtgttgcactggcgcccactatgacatacaacgaattcggcctgtgtgccctgccgtgtcatgtcagtatgaccaggaggagtaagacgacgagtatgatgatcaggatgacgatgcagtatgtggatttggtttctgaccgaggaacattcgggcgcctcagcgcgtcagtagttcgtttacaagcgtcatcttgtctcggtcggcatgctcaccttcattcgcccggatgaatgccttgagacgcttattggccgccgtcaacttagaatccgttgcatcgatgcgcagagataggtcgtccagcatcctagggagcgatgcgatgaggatcgggagggcatctcttcatctgcctttcgacctactcattctgctccaagacctctcttccgataagacccgcttgaccggccagtgtcgcgatcgttccagatatgacgcctattgtgctatcttgctgtcgtatcatcatctactcaagcagaccggcgctaacggcgagtcagcgacgaagggcacgggctggagctcacgatgacaggaccgacctgttgctgctccatctcgtactgacccacttcgtccaagggtctgccagtgtcattggtgttactccggtaccgctgtgatccactgctctcgcccagctcgacattttcgaacctagtctgtctgctatgctcatgagattctcgtagtggatctacgggtgatttcctatcgcttagcgcatttccttgtaaagactgacgtgacgaagaaagtaagtctcaacaaataaccttggggatggctgggctgcgctatgacgaactttcacctcgcctctgacactttcgaggaaccttcttcgtgccttgacctcgtaatgcgaaatcccccatcgatctccactctcttctactgcgagaacgcttgcttcgagatcctcgatatccagcaataagcagcgtaactgattatcgaagtcctgatgagcctcagacacgatggctttctgacccgctgaaccgattgttgcgttccgctcttgcaagcggcggtaagaagcggctagatttcgaacctgctcgagattagcctcgacttctctgacaaggagagtattcagctacacgttgcacagaagacgagtttacccgtttgcaaaactcacttcttcacatcgtgatacggatcgcggctcattcttgaagctgcagcgattccgcactgagtctactgccttgaaggtgtgaggcggacacgctaaggatacaatcatatgatatatcgaatatgccagctacgccaatggtcctgtcaagactctgataaagcttacgcacttttgtgtacaaagtgagtagttagtctgatttcgtcatgactttgcagggccacgcgcgaggctaactagaagctagaagttgaagctagaagtcgtcatcatacagtcataaatcagactttggcacacttgctctcggaagagacatacaaaagactcgctcagaaagtacaagaggcgacaacggaaacacctccttgttaacccgtacagctgtacacctgttcgaccaattcccgtgcagaaacgacagaggcgggttcacaaagcaaacggacaccaaatacacaaatttcggcccacttcttcaagcggcttccttccaccctcgcccttctaggctttgtcttccttccagagacgtgcgagcaaactggccagtaggaggcgaaggagcacgatcgcgagattcgccgagagcagtggtcgatggcctactggcagcatcaacctcttctccaaggacaaactgcggaggaacgcctgcgcccatgtgagcgtcttgacggtccgtttcgaattgtctctccctacgttcctcttcgagatcgtcatcggcatcttcgccgtgatagttctcgcgggcaatgtcttcgagcatcctttcgccccgttctgggagggtggctcgacttgaagaccggtgaagagagtgtctcagggatctcaccgatgccgctccgatagaaggctgacgagagagcgctgcagacgtgacagcatcaatttccacggtggtcatctcgttagcagggagagcaagtcgaagcaacgaagtgtatgctgtatagcgtcagacggccgagaggtgagcaagggacatcagatatatgcctcaaacagtctgcaatactcacgttgtcgacacacaggacagaaccagcctttacccttcttcttacgcctctcgcgtcctccggtggtcgtagcgggagccggagccgatggggtaccggtcgcagcattgcttgcgccagcgcctccagtctcgcccgtaccgtccgcaccggcctcgccagtacccgaggcctcgttgccttcatcccttcgagcgaccttgccacctgcaccgaattcgatcatgcccacagcacattctcggcagacgaccaagtggcgacaaggcaacagcaccacgtcgcgaggattggtcaagcagacgatgcactcgttgggagtagaggccatgggatcctcgccggcggggttagtgtctcctaaaccggcacccgacgcaacgggcgcatcgttgtgcgatgaagaagccagaccatagatctccttcagcaagaacgcgtgatgtccaatctgtatggtacgtaggtgagcgatatgcagctgcggccattgacgagctagcagccggatggcgctcattactcacgatggcttcccggcgcacgaccttgatgaaccagatcctcttgagcgggctgagaccttgatcgacggtctcttcggtcacttcgggcccttcttctggcacatcagcgagtccgccaccagcgatgtccaccgcgggccgacttgcagtcgcagctcctccgacaacagttccggcgagcaagacgtgagtagcctgcgcgttagtaacgctcatgggcgagtcgtcttgcttgagcgcgtccaaacggatgatgactcgaagaccttcctcgtccttgaacgcattctcctgaccgggagcgtccccattgccacccgaagtgccagcagtaccgagggttcccatctcgacaatctcacccgttccaccctgttgtcgacggatatcggcgatgataccttgttcgatgtcaccgttccgcctctggcgtctgatccgatcaaagagggatcgcgagcggggctgattctcaatcatggcctgagcagacatctggttgacatcagccgcattgggctgggccgtttcgcgtctgatctgagcaggctttttgatatcgtcctctgcgtcagaaccttccgagccatctccgtcgagcttcttggacgcgctcagaagttcctcttcggcccgcttctcatcttccatggcctgaccaatgtcgagcgcgttctcgtggggcaattcccagactttgccgaatccaccttcgcgggtacaggtgaaaatgaccctcgagttgccgtgattcatgaatcgaggatggatcgagacgctgatctgaacgcgaggagctgaagagtcgtacgtaaagcgcaagacgtgtcgaatggctccagctcgctcgatgctagcacgcgacgcggcaggatcatacgaagccggatctgtgttggtctcggctggtacgatctcatcctgcgacactggaaccagagtcaacgtgggtcgtttgaggttgacgagagcttgcagcgtggtcgtctggtgtactccttgctgcagatgacgatcgaacccgagttcaactgctactcccctcacttcacatcgcgaactgctcgactcacctcttccttcttggcgttctcaacccagtccttgacgacactgagaggtaccctttccttcttattttgacccctgatccagccctcggactcgttctcgtccagcccgagatcgggtccaaacaaggtctctcccttctttccacccttgcccttgggtgctttaccattcgcctcgagagcagccgtggttccgttaccgggggctgcgttcgtcccatcgctcgcccccgtcgtctcgtttgcaggcgtccgaccgtatcctcgcagtccggcattgccctgtccgctgacatcgagagggatagtcacatcgtggttgtgcagaggccttaaacctcctggcgtgaagggcgtagcccggagtcgggtcgtacgggtgatgtttccactgtcgatcggcgagtttaagataggattggattggcgatcgacaaggcgattttggcgattgcacatcaaggtcatcgacaaggagcggaccagatcgatgggcaaagagagggagagagggagaagaaagaataacggggtgtttagtctgcgttcgttgatgtcgagcatgtaacgattgttcgactcactaactacccgaataccaagcaccgatggaaccgcttcgattcctcccaggtcccgagggagcagcgatgtcacccattgtcacggatgtggtggagacaagaagggaggaaaaaggaaagctactagtagccaagtgattcaagtgattgatagatttacgattacgaagacgtgttggattggtatttcgagagtcgatgatgaactgtgtattgggtggttgagtgggtgcgtgcgtgcgtgggtgaggctagaggtcgaaagaggcgaacttgggttagcgagacttgattgtctccctctgcctctgtgcgtccccttgcgtgtatctctggttccccgtgggatgacatcccacccttctcccctccgccctttgccttttctctcctctcctccgctcctcccctgccttggccgccgatgatgatgccgatcagtagtgagcccactctgcctgcacatctcagcggcgcgcgggcacggggtctgctccctcctccatcggcgtgggccggcttcaacctccactttgatctcggccccgcgtttccctcttgatcacgctcgagcgttcaatcatcgattccatcaacgaccaacaattcaacgatcaacgacgatgcaacgatcgactcgcaacctggatctcggtcatatcgatatcatcgtcctgactcagactacaccgtactattgtgttatagtgttatagcatcataggactgccaaacgttcaggcagtatctcacattagtaccgtcatgaccactttgacaccatgatatcagctcgcaaacctgcctactttcgaagatcctccacgcctatcatcagtactactactgcgaggttgacttctacagaatcatcgtgggtggatccaggtattgcacgtctggaagacaggttagcaaatcctagactcactcgcctgacggcatcgtgaagctgacatgcttctcctcaaacgatgaagtcttcatgatttgctagagacggctctgcaatgctatgtcgtaagacatttcgtttggttatcactttcgtctcgtggttcatatggctaaagccggcccatttccgacaattctcaccgcagaactcttggtacccaattacctcgccaagggacaagacattccttccgcacgtgtaccatctacttgtccgtgtattgagctcgatcgcgatcaacatcgaggcagcgagcgactcgggaggactggacgagctcattttagtgaacatccccgaaatcatcgccaaacatcttgagacttggaaacgagccaacagcgacgtgctcgatgcgcgatacaacaatgagagcgaacgtgagccgttagaaggcgctattgcggcaagatatgctctactggatggccattcggcggtacagcgtatctaccttcacgaaattgagacctcgcctgtagtcaaggtctcaaattttgagacggatatcgcacggcttcccagcgacgtaaatcgttctctaggagaagccatgtcgtcctcgctgcatggcgatgatccgttctttcaccagcaccttctcccgtcactggaccctgcgccagcggcaatcaacagaagccccattccgtccggatcatctcaagcgctccgcccgacgccatcgtaccgagtgtctgaagcttacctctcaaccctcgcggagcgactcctacgccatcatctcccttccaccgattatgcttccgctacagaacgcacgatcatcaccgagatcctcgcttctgccattttgtcaaacgtcttgcgaaagctgtctcaggggtggatgttaaacagattggcactatctctcctgggagacccccgacgacgtcacccgaacgatcaaccgtcaaacacaaatgccatacatcagccaggatcgatgggaatccaggctttactcttcgaagcttatcgcacagtaatcctgattatctaccaattcgcatcagtactccttttcttgtcgaattggtacacctcgcttcacggtcattggaaatccgtaatcgccagcaatcccttgcccgaaggtaacgaaaagatccacacgacgcgaccggatcactggaaggcaggagttgaaaacgctatggaacctagcctcgccatgttcggtgcctttctggatttggtcagcggaccgggaccatcgcgatgctctctgaccgaaatacgagcctggatcggtatgggctgtggcccggtagtactgggccgttttgccgataagtaaatcctcctcaccgctacctcatctcctcttgattttgacattcaacaaatactacaggcttcttccgctatatatgcacaaccatctatacaagccttcggtccttgctcgtttgacgacgactttacaggaggttctctttccgaacggagagatcgcgccttcagttccggatcccaccgagagcgaggcacaggacttggttgatagattgatcgccaggctactcgaagtcttccctagtgagttcatttcgctcgcaacagtagtggaacctggcctcatccgtcgctcccttcgtagtccaagtccgtcgcgtcatcatcggttccgacacgcaggcccatgaagaagccatacgccgtctcatcgctcccttccaggattctgatgtcaatctgcatctattggtgcgattactagaaacgattttgttgacgatcgagcctaagctcgctaatgacccaaatgacatgtaatgatcacggtgtgtagatatagaacatcgtcaggtttccatttgaccgatcgtgcttcgagtgacgtcaaagtgccgtgcacagtcggagagccggtgcaataccgacgcaacaagatgaaggtgtttcggcggactttttcacttatactagtccattcccctaattcctgccatcgctggcaactgtctggtcagactgcagtcattgtttatcatcatcggaatactcttggagagactggacgaacctgcccgagtggactggcagccctatcaaccctccgcatatgttccggaacgacagatacatggccacacacccgggggggccgcgtatcgcggctggtccactcgacctggccaatgtaccattcgcaagcagtaaagaagctgtccatctactagaaccgtacgtaaacctcggcgtgttgcatcgtgctgcagagcagcaaggggacgaacccctgaggctggcaatgtctagactttcagtgaagacgagccatttcgaacaaggaaaacacgtactaatcacgatgcatggtcctgagacagaggtcaatcgtccaatttcagctcgagggaatattcaggatgtctgtgtatctgtccggctagtagtcgatgactatcaagatgttttcagagattttacagcaacgcatcaccttagcgcgcgcctctactaaggaaagggcgtatccattcggggcggagtcttcgtaatcccgcaaagccaaaacggaacccttctacgtcagtagcaatgacagctattagtgaggccccatcccgatactggatgtcggcgcccgttaccttccaacaactgaatggagttgccggtacgctaagcggcactttgggtcacattcctgttgttccccgaattattggcttgaagcatcagacttgatacggatctccctcatgagcgtcatgtatcgagattaacgttgcgtgggttgaggtgactttctgatcagccaccagctttagccgtctgcgtttcaccctcgtatcggattgacccgatgcctctcctccaaggtgacaatcggaaccgtccaaaatcgcgtcaatctaccattcgacacctcggcatctatatcgtcgcctacctaatcagaatgggtgcgttcgggactaacgtcaccgcggaacttgagacgagcaaattcctccagtccaagagtacatgctcgacttgctgttcctccatgccctcaagaatgctggagtaaaccagctactagtacctatcagcattagcgtttcagtcatagcacagatgtcaaacgaaactctctcggtttcccctggatctgcagcttgtccaacaggcgtgtccgaatccaagtcaggctctccggtgaagaagtggaaatgtgtgttgaataatggcgttgatgaggaaaggcatagaatgatgacctggcttcattgagtcaaacagctccaggtcggtccgccaatgatcaagagtcgtcacgttagcacgtcagatgttgatcatcgtcccaatcaagccgtcccacagaagccttcgtgaactcttggtcctctacttcctgcaagcccttcgattgcggttacggccgaatcagaacgcgttctagaatcgagactgctgtcaggggacgactcttcccgtgcgtcggtagctcagtagctagcagaacgtcatcgcaagggacactttgcgagaattgcattgcgcaagacagcctgaatttggtataaggcagatcatataatatagcaatcgcgatatacatcacgacgaccgaattacacgaccgggtggcgatatacgattgacgtcgagcggatcacaagggggcactctacaaagcacgctcctggtttcggaggttggcgaggaggggtcccttgggcctgacgtactggacgtaagaaccgtcggcgatgcatcgcttctcggccttgagggcgaggtactcctccttgttgacgtcggtgaaaccccacttcttggagatgatctgagtaagggaagggtagcagctgagtttcggtgaagtttcggcgcaaaactttcgtggactcacgatcttttgtcgaccggggaacttgtatcgcgatcgcctgagagcctcgaggacgacggccctgttgctctccttgcatcggacggaaagaatgacctgaccgctgtggtggaagaaagagtcgcacgttaatcagcaatggctccaaaaacatccatccccatgcccgcagtaccacgcacatgttgacacgagcgacacaaccgtaaggctttccccaagcgcctcgcataccctgttgaagcctatcggctccggcacaggacaacatcttgttgattcggacgatgtggaaggggtgggccctgaccctcaagtggaaagagtcctttccagaggtcttgacgatgtacttgttgcagcaaatacgggcagcttccaaagcctcggaagagatctgctcgtattcgtccgagaccaagtgggcacagaaggggaagtcatcgacggaagccctctttcggcccaagtcaaagattctgatcttggcgtcggggactgcgaataatcggggatatcagtcttctagttcctgggaatgtattggtatgacatattggtactcaccacctcggttgtacctcgacttggggtaaggcttgttcttacagtaacggtagcaacgagcaggacgacgacccattttgactaaacaagatgaaggggctggcaatcagtaacgatggcgtgagcctcggctgcaatcttcgagggcacagcgagcgtttgcgaggagttcgacgtgtcgatgtgtggcgaaagtgaggacgcttgaagtcttccgccttcgagcttcatgatccagtgcctggtggtcggtccgtcgccagtgctgcctcgacatctatctctcgtcaagtgtagctctcgcctagaattttcccaggatgtgattatcgtatcgtcgtccggctggactctccgccatcttcgtctttggtcgtcctgtgtcgccgcgattcttgatagttcccgattcctcctcgcctacgctcgctcgatacctctccgattgacagccgtgtacgagcgtatcctcacctgataatcttcttgtctggttggtggtgtaaaacgacgagccagatgagaggcgaacgggaatggacgagatcaagtcgatgaatatcaagtcgatcaaccagggttgtgctgaccgagcaagagcaagagagggaggggacggcttggctgacgagagtgggttggctcgctcagcaagcaagcaagcgagcaagcaagcactgacacaggctgagctgagtgagggggggattgctaagccgcgcgcgtggtgccggtcgacgacgggtccccctcgcctcgccaccgactgagcaccatagaggcaggcaaagcagcggaactcgtacacgcggccggtgcgaacgtagagctccgcgtcaatcagaagcgcgcgtgcatccagatgtatcttaagcgcgcttcgaaattcttttgcttccaagttatcgccgactgacggtttcacgggcctttggccgtcaccatgacttgcaaacgacattacacagaggcatggactgagagcaatatgatcgtagccttggcaataatgtgtaagatcattactgcgagtgaaaggtcgacgaaaggcaaggcggcttcaatcggaaagaaccgaatcgactgtatttgcgtaaactacgacctcgtcaaaactttggagttagcaagggcaccaatcctcttttcaactcgtctggatatcacaatcagaagactccccatctgtgggagcacgtcgagacgacaacagaaaaatgttgcatcgcacgcacaatgtctcccctgcgttttggtctggcgcgcgtccttctccagtgcccagctgaaacgcctcgtgataccatcgccctcagagacacgatcgagagagcttatcctgaattgcttgagaaatacttgcctcgtcaggcttcaatatgatcgaaccatctgcaccgctggcaattccgtgtggcctcacatgcggacgatccccttcgtcgagctttcgcgagcaaattcgatggagttccgttataggcatgataatcgatcgttcgcatcatctccgattcgattgtcttggatcgctaattgccttcaacttcttggtcgcctccttgacggatactggctgttgtgttcttcagctcgaaccgccgaccttcatacacctcgccaccatttacaaagtccgtcatacgggagcgagtaaagcgcctgattacttcactggggctccgaaaatcggaagcagctagacgaattcgccccgttacacagatctggccatgaaattaaggacgatcacaaaacgcgacgaaatcggtaccgaagatccatttgcacgcacaaggcggagggagggtgatcagtctcctggcaacgcgagtaacatttgcacatgccggcgacctttacagtagcctgttcctcatacttcaaatgacttcagagggctatgttgcattccttacatgcgatgtcttatcctcccgacctgatgttcatgcaccgtgtcatcgaattcagcacgtttcgctctgtatcgtatttaccgttgtcgcggtcgtctgcacgacaacctccaagctgtacccaaatcgcataatcatcgatgtccatatggacacggccatctatatctgtatcgacacgactggaccttgttaccagctgacgttcggttgacagcgccctgtaagcgaagcgcccgtctcccgccgtggcgtcatgcgcgaagggtcgtttggatcccatctgcctcgtcgatgtcccctggccacaaatccgccgactccaccttgtaagaatgaagatgatacacacagctgaacttgttcaacggaagaggtatagcaaatctatactagtcatgattacctgtattccttgcgcggacaaccgttcaaccataatggtcacgcacggcgttcgtggccgcgaacagggttttacctcactgacagcggatcaaaccgtcggagccgcattgtggtctggccaagaggttgccccatatatccacagaggaagatgtcctgactccggtccgacgccagcaggagcagtatccttcgggctggcagacggtttcggttccatatataaacgtgtttcatcgtgaaagcaccgggccgtttcggatagtcaggtgacgggtctcatagcgctgctaaggttccgaccagggggtcgacctcttcgctcaaacgttttcgctggacgagaagctacgtgtcttctctatcaagtggctcaatactgaacaaatgggccggaagccagtcggcgcacgacggtgtggccgctcaattaattagccgctcaaggagtctcggacatctccgaacacatctgagctcgagtgtacagccgcttttcttggttgatcgcatgcatcgttcgacggcgaagctatatctatgcccttcactgatcactactagatttaaacgtttttgaaatgtccctcgaaggaagcagcagaagcttacatcgggatcgatggccacaccccttccatgaaacgccgatccagtaaccttttcggccgaaaagggctgctctggctatcacgtgattgttcggattgtcagatcagttaggtccgggaaaagccgttcgacctgggaagaaatccaaagaggttcattggctcggacttttgggggcaaaacatcagagttgtctcttaggtgtaagtcggatccagcacatcgtcgccttgttcgtaacaccttgactgtatcccggccaaatatacggtggtaacgagtcgcacggacaagtcgttcaaccatggcttctcgtctcgcttcccggtccaaggctttgcctcgatcctcggcttcatcgactctttctttcggtcgacgctctctagccacccatgcgtcaatcccccctcaatacgatgccttgaaggagaaggactgctctacgttaactcctccctactcccgtttgctggacacgctggacaaggtccgagaggttctgcctaggggtagcaagctcaccctggccgagaagatcttgtatgcgcatctgcgaaacccggaagaatgtctggcaggaagcaagggattgtcagatgtccgaggtcagaggtatctcaaacttcggcctgaccgggtggcgatgcaggtatgtcctggtgcgttcggactgtcgcatcgtcttgtctgaccccttcgatacaacgatgattaggacgcctctgctcaaatggccttgctgcaattcatgacgtgtggattgccaacttgtgccgtgcctacttcgatccactgcgatcatctaatccgagccgagaccggagctgaagccgacttgactcggtcaatcaaccaaaacaaagaggtctttgacttcctcgagtccgccgctcagaaatacgggatcgagttctggcgaccgggaagcggtatcatccactctatcgtcctggagaactattcggcacctgggttgttgatgctcggaaccgattcacatactcccaacgcttcgggtctcggaggtttggcgatcggagtgggcggtgccgatgctgtcgatgccatggccgacatcccctggtcactcaaggctcctcaagttctgggagttaagcttactggcgaattgtcaggatgggctactcccaaggatttgatcctgcacttggccggtaaacttacagtgcgaggtggaactggtcggatcatcgagtactttggacctggcgtagagaaccagagttgcactggtctcgcaactatcgccaatatgggtgccgaagtcggtgcgacgacgtctgccttcccatacactgctagtatgaagagctacctcgaagcgaccggacgagcacccgtagctcgtgctgccgattacgccgcatctcagggatacctcgccgctgacgagggtgccgaatacgaccaggtcatcgagatcaatctttcggagcttgagcctcacctgaatggacctttcactccggacctcgcgaccccattgagcaagttcaaggatttcgtgaaggagaacggttggaaagacgatttgacgtcggctttgatcggttcatgcacaaactccagttacgaggacatgacccgagtcgcgtcgattgccaagcaggcgaaagctgctggacttcaaagcaaggttcccttcctggtgactcctggttcggaattgatccgtgccacgattgaacgagatggtctgcaagagacgcttgaaggcgtaggtgctaccgtacttgccaatgcctgtgggccctgcatcggccaatggaaccgaaacgaaaagctcggcgaggagaacgccattctgaccagtttcaaccgaaacttcaaggccaggaacgacggaaacttgaagacgatgaatttcttgacttcgcccgagattgttactgccatgtcgtttgccggcaacctctcgttcaaccccatgaccgactctctggacacccccaatggaccgttcaagttcagtcctcctagcggacaacgagtcccggacaagggtttcacgccgggcgacctcagcttctcacctgcacccaaccctacgcctgtgcccgagactgaaatcgccatctcgcccgagagccaaagattggagattctcgagcctttcggtagtgctttcgccaacggtcagcgagagttgcctaagatgaaatgtctcatgcgagtccggggcaagtggtaagtagaccgatccattcccaattacccgtggccgtttaaatctgaccgcgagtgattattgcagcacgacggatcacatctcggctgctggaccgtggttgaagttcaagggtcaccttagcaacatctcagaaaacacttgtgcgtgtctggcgaatcggcttgcgggcgatttggtctgactcggtctttttcgacagtgatcactgccgtcaacgacgaaggtggtgaagtcaatgttgcctttgatgctgaaggcaaggacactatccccaatatcatgaagcgacaaaaggctgctggtcagccatggatgttggtcgttgaccagaactgtgagttgttcatggtcttcccagctaatcccctttgagactgacacgtgtctgacttgcacaacagatggcgagggttccgcacgtgaacatgccgctctgcagcctaggttctacggcggtgctatgattgtcgctcggtcattcgctcgtatccacgagactaacttgaaggtcagttaatccagtcacagccttgcttgcctgtccgctcacgcgtgcaatactatttcgccacgtagaaacaaggaatccttcccctttggttcgtcaacgaggccgactactcgaagatctcggcgatggacgatgtcgagaccgttggcttggccaagattcttgaaggcgacctaaacgctcaagttactcttcgtgtgaccaaaaagtcgggagagaccgtcgagatcccgaccaagcataccctatcaaccgaccaggtcgattggatcgcttcgggaagcgcgttgaacagcatccgtgccaagtttgccaactgatcttcagcatgctgctgagctcgaattgtatgctggtggcctgtagagaaggaacctcaggctgacattgtatcaaatggttccacccttatatctatttaattcctgacactcaaactcgatcgtgctaggtgcaagcagatgcattcaaatcatatctttgctacgtccaccactcaagtcatcagtttcaggtgcaccccattcgcaactccatcagatctgtacagcggaatcgaggttcgtaatatcggtcgatctggcggggaaaattgatcggagcggaaagaaggctgagcgggtcgtcttctgtccagcgaagcaaacgacttcctgaatgagccgaggaacaggacgcagccggaattaatgccccgtcatctcgatggggatcaatgaccacaacccccatttaagggccattacaacgctgcgtataaagtattcccgatattcccgctcattgtacctctcgacaatgcgtaatgccctcgctctctgcctttccgggtcgatcacatcgacctaggccgccatccctttaagcttgttcgtaaagcagttgtagtatttgcttgtctgagcttcgcgattcggtcctatcgcttgctccgcctgttcatgctcgacttgtgcaagtctcgctcgatttgcaaccagtttcgactactactattccgacaattttgggtcacattagcttgtatatcaagcgaaacatacaatcaatccggggttcaacgtttggttatatggatcggctgcaaagaggcgagttggcgacgcagtatcttgccagaggcactggaccacgcccaattcagcgcgccattacagtctcataacggcactccattcactcacctgcgcggtaatgcctcgacaggaatgatcccgccgcgtagctgtttatggcggctcacctagcataaacgcagtagattgccggtcaattctgctggcgcaaacctcttgattgggccatactaactctttctttgacccagttgtcgatgccttgcgtgtaatcatccatatccatctcacctgctctaagttgttgtaagatggtaggttttggcactacaaaggctcgcggtagttcattgtcttccgcgtcttttgtggcaatgactccggcatccaaaatgtgagggtgggacaggagcaatgcctccaactcggcaggcgcgactacagggtaaaaccatcagcgttcctctcatcatgtcacaatgtcgtcgagataccttgcaatcctttgaccttgatcatctccttcaaacgatcaacgatactatgcaggagatccgcaatgtgagctgccgttacagcgcggggaaatcacaaccgggactcactaccagtacccttctgtatcgaccttgacgacgtcgccagtccttagccatttatcatcggtgaatgagctctctgtcgcactttcattgcgccagtaacctctgcaaacccgaatcacatttgcttaagcgcggggcgcggtcgtccagatccatgagattccgcgatacgcacttcatcactgttgggccctttaacaaaagctcgccgggacttccggtcggagcttctgtgccatcggcttgcaccactctcgcttgtagactgggaagcaattgtccgatactgcccaatttccgtcgcgcgtctctgagcgtcaacacatgcgtcgctggcgatgtttcggtcagacctgtaccccgcatatcgatagttgagattaaagatgtgcgacgtcaaatggtcgcggatggatgcgtaccgtatccctgggtgatcataaagtctttaccggtcgtatcgcttagcttgcccatggctgtctgagccacgtctgggctcatcggcgctgcaccgctgagtagccctcgtaggctagacatgtcgtacttggcgactccggagaaattcgccagcagggacacgagaggaggtacaacgaaagaccaagtgacctgatgggattgtatggtggtgaagaatgtatgaggggtgaatttgggcaggacgatgattggaatccgcatagtgaggggatggagcagtaccctttcaagtcccgaagcaagatcgtcagctcgcacaatcgactgctcggcaacagcaatacaaacaaaactaaaccgaagatatctgcagaacgatcccagtcgcatgtcagtcaccgcataggtacgatctacttcgcgaacagcgtctcacgcgagaatggcaagagagcaagagctttgtcttcttgctctggcgtaagcctttccatggccacactgaatatggtctgcattgtcgttagattccagtgggtagtttccacccctggcaataaagcgtttgagctgtttgctcgacggtcaaatcaatcgcgatggtcttcaccttttggcaacccggtctgttatatgaatcgcaagccagcacgaggagacagcaatatatgatcaaaatgcattggtttcaatattgatctcacgggatacaacacgtcgagagtggtattcaccgtgccgctactgtaacataacactgctgcattgtgttgctctcccggtcctagtgtctcacctcgccaatcccccaagacgtcatcggacaccatcaatgagcggaaagatcggtcgtctcgatcctgtcggcctgtacccggcgtcaatcgatagacttgtagatcatcctgagtagagtcttcttgtttgatgacttgctgcgccttttcaaaggtgtccatcaaatctggatggacaaaagcgatcttggccgtgctatccttgatgtgataggccagttcatgcggcgtgtaggaggcactagcgggcgttacgatcaatcccgcagcctgacaggcgaaaaaggcgacggcgtattccaacgagttcggggagaagatcagggctacatcgcccttggccaaccctgagctctgtttgatcccgtaccccatcctgagcgatgacgatctgacctctccttgtgtcagtgtctgacctgtaagaccatctgtataggcaggcaatgcctctcttgccggatccgatccctctgccggaaaatgaaagtggaacaacgaggtcggttcgggcaacgccggttcggggaatggcgactggtatacggtcgaatgataccgtttggacgagagtgtcaggttccggtcgaaaagaggccagaacctaccaagcttcgtcgtcgatccgcaacttgctattttggcttgcccgtgagaggtagaaaaaagcctggatagcccaggtccagttcgcgacatcgatccatgcacagctagagaggtccggcatgctcccggccgaatcgaaatcatcccgaagctgggtatcggagaatacttgatttattctgccctctggcgtacacttgtcttgaaagcgatgtaggtcggtgctcaagtaacgagcaaatcgatagagcgtggttaggactgtagtcaaccgactaggcagatataagtagatgatgtccaacttgcaccgtcgacgttgaatccgaggtcaacaacacgcaacccctcgcgagcgaatatgaccaacttcaaccttgaaacccatctcgggtcaatgtaacagctcatagagggtaccattagcaacagagcgtgtccagatagtaaataaccttggagagcaaatcctccctgttggttcctccagatgtcgtccaaaaagacgtcagttttgccgccagaggtagctctcggttccttgaaacttatgtcgcttgttctggaactatagcaaatcggacctgttggtcaagaccaggtacttaaatcctatcccagcaccagcatgtccgcctcagactatagagatccctatcgatctaggacggatgggcaagaccgatttgacctcggcatattcggctagtctgcccatgcccatgatgatcgacagcgagattgggatgccgctcgacctaaacgcgtgcggggggatctggtgggacgaggtagatccgggtgagtgcacttttgaccacaggagatagcacctctaatcggattcggctgacgacttcgtcttgtaatcagctttcaatcctctgaaacctgtagcgatcgactcgctacatccggacgatgccgaactgctcgagatgcccaatatcgtgctaggtgcgggcggcagcgggactcaacaccagctaccgggaacagcagggcggccacgcatccgggtagaggagacgtggttgagagggacgacgtacatgggcaagaacgacggatcaaaagcgccgacgatcacaaaggtcgcagagacccagtgagtacggtccggacgaaagcgagcttcacctcaaactgacaaggcgacgatcctccagggagattgaagtgccggacgcgtccatactttcgcagctgcagacgatcgaacggtcgttctggcaacacgaacagttcagcgacgagagcatcaagaacctgagacatccgacgaagaagggagtgacagcggttgatgtgagcgacagacttttgctatctcgcgattgcccttgcggcgcgctgatactatgagccaggctttcgatgtgctgccggacgaggatgtgtggagtggacattacaatcagatcaacttcccagaacgtcccacggacaaggagtcgaacaaggtacgtcaggcatcggcgcgacgacgttacctaccctatcttccaggctgacgaaagagcttccaacgagcagatcacgaacgaacagctcttggccagtatttttcggccacgggccgacccgatcaagggtttccaatcttacgcgccactcgaggaagacctcgcgcagtggcacaaggttcgccatcacctgctaccagcgaacgaggatcgggattacaccaatgtcgagtgggatgtgagtttgacaccttctactctgtgggcagcattgctcttggaagctgacatgccgtacatctcccagcacgtgcggctaccatttttgaaagattacgagatcgtggagcaggaccgacgtcaggccggtgcgacggaccaagtccttgtcctatccttctgtgatggcgagcaaatggctcagcaagacgaactcgctggcgccagctcctttgccggtgccaatggatccggcaacgacgtcaagccgatcaagattgaagaggaggacgaggacgatgacgatgacgacattttcggggacaaggaaatggagcaggaagaagcggcagaggccaaaaaggaggagatcgaggatatgtcgacccgtatcaaagccaagggcaagggtgtctactttgtcgaaatgtattcgaccgtcaacgtcaagcgcatgcggacagttgtgagtcgcctgcacagcaaccgctcggaccgcaatctgatacgtcatactgatcgacttgtgctttagactggacgaaattaccagcagcaagaagacaattgggacgctctcacgttggcttaccagcatccgtccgagagacagcaacaacgacgggaagaccatgccaagttcctcgagccagagtggctgcaggaagagttacatgcagaaatgccagaccaagatcgagcaggggaagcgatgggggacacagccagactatgatgtgatctgtcccacttcatatgcataacgagattgtatagggtaccaacgcggccagatacatgcgatacaacagtgagatgtagatcatgtcgttcggcaagcctgcagttgccgagtggggacgagcgaaggagagtgttacaaaagagcggccgaacgtgcttcgtgctatgctgtagaatctgatggcttgtcgatgcgcaaaaggtcctcgaatggaggggtgtccggtgtctgtggtgcttcaagtggcctgattcgcacatcgtcctgtttggtttcggacagattaaggggcgatgcgacaggcggagtgctgatgctactgtcctcaagtgatgccagatcgcgtgatcgaattccccgtggcgaatcgaatcgatcatcatcttcgacgtccatgtccatgtccatgtccatgtcctcgtcgtcgtgaccaaacatttcgttgacgagctgtctatcctgctcgttggagttgcctgtagactcgcgatgctcgcgatctgctgaaggaccctttctgctagatgtcgtgtcgaggcgcggatcgatccacttgccgcgctgtttcagtttggcgatgattttatgtgcccattctttgatgaatgatttaagcttgaccttcttttcctccgagagtcggtcaagtttgccgtcctggtatgtctttcctcgcttctctttgtcgactagcacctgtgtacactgaaaagggcacatgggcgtgcttagactcgccgaactgagacttgacctgcctttcaatcagacttacctcttttgcatgcttcttgaatgtctcgcgatccatctgactctggtacttcgacatcgttttgactacgaactcgccgaccagcttcataagctgcttttccttctttgcttcgctggatatcttaggctttttgcgacgtgagttggagtcgccatgctcagtacgacgcttggaagctgatgcttgaatcgattgggtagccctcaactctgctgctgctgctgcctcccgagccgctgcttcttgactggcctgggcttgcgctaagatggcgtcaagtcgattcttgtccagaaacggattggcaggagctggggatgctacagccggcgtcggtgtagaggatggcggcttaggcctggcatgcatgataggccgaacaaccggggcaggggtgaaggtgctagtcttgggtactggtgtcgagaccgacactgtatatctcggtttatcgtaaaccagagtgagcccggatgtctcgccattatttgtgtcgtcagcggtatccggctgcacgatcataaaaataagttagaccagaacgagaactagccacaacacggctctcacaacgtgaactcttctgggtattcggaagagcactggtcggtccttccagtattcgagaagagactgtgtcttctggcggatgttctcgtccgggtggttcaagaagcctcgaaccggctcttcgatcttggaatcgtcaatcttgactctgctcgcaactttccacttctgcatggcttcgagagcctatggaacggagtcaaaggtttgagtgctcggacgtctcctcttaaattcgatcagtgccactcacaaggaggaccacttcttggtcgtccgtgaaatcaccgagtacagtagtcatggtgctgaatccatgcatccgagtgatttctccgatcgctgcctcatcatctgtcatctaggggtgagagttcgtacacggtcaataaatagcaaactccggttcaagcgagtgactacttacctgaaccctttgaagtaacttgacaagcatctgacggttagccgtggcctgtcgtagagctgccgcgactttgggcacgtcgctcgatgtcataggcttcaggacaggctgtacggacgtcacgatcagctcgatagtccgacaacattgcactgagaacttacgttgaaatcctcgtccagtctcttggcgcgcttcttcttgtttcccttcaatcccaacgcagcaatttcttcagagacaccgagagctgccgcacaacagcgtattagcgtcacgggtgatgggcagattcgcaaccgagactgaccttcgaggtaaaggtcatccatggtgcccagatcggtctgtactttgcctccgatgaaacccgagcaatttggctcgccacaatagcaaatttgagcatcgtagctgcaagataggggatgttcagcgatggaatcttcgtgtctagcatgcttgacatcttacccgtagcgatccacgttgtaattgaaggtgagttcctcgccttgaaggatgtcgcgtttcgcgaaaattcccatccgcattcgtttccccaccacccatttcgctacataacagttcggattgcaagagtgattcaggaatcgcgctttccctccccgctttgtcgcatcgatgtactgccagggacatagtggttagaaggtgtgttctgatcggcagcacagccgctaagagcagcgggctcgccgtgctacgtacctcttccttctgaagcatcatgaagtaaaagtgctgaatgccttgatcggcatagtcctttattcgcttgcgaaatgtgctttcagaaatgacctccccaatgtattcgtaaataaagtcctctctgtgggccagttggcagcgttcgtcgatcagtccgcaccaaagccagcattccatgcagcaattaagaaaagctggacttacgcgctcaaatcgctgccagctcggataccgaaccctttcttctcggtttgaacgatttcgatgtcagcatattgtttcctgctgaacctgttcacggcataaggcatccatgttcagatgcgtctccctgtgtgaaacaatgctcgagaaattgcctagtcgtacctctgattctggcagtgccctctcgtctggcattgcccgttcaagcattcaacttgcgtcattcggttgatacagttgctatgaaagccgcaagcatcatccggatcgtcctcatctgtgatgagtgaaactgacgcagatgagccgaacagcaaggtacaaggaaggaggtttctgagctcaccctcatcgaaggtacaatcgcacaccatcatctcctcttgctgattgctccgtccaagcccttttgcctggaagtcattctctcgcagctcggaaaacgtgctgagagcttcatgttctgcgttcggtaagtccttgatgaagatacgggagataggctcaggctgagttctgcgccgggagaacgacggcttctcgaccggagttgcgggaggcagggtcgaagagctcgatgcgacactgctggctctcgtccgtccatgctgatccacggtcacaccgatcatctctccaagggtgcttgtagaaggtccaaatatggactcggcatcgaatgctggcagtgggatctcaacatggccgccatcccggactttcccttctagcatggctggttgttgtggatgttggtctccggtagtcgccaaagctaaggtatcctcctgctgcatcctaaagcgtcaaaggaagcctttgcgtccttgttgctgacagctcgtgcaagcgacgatgtcctcggatgactgtgggcgtccaacgaatgtggacataagtttggaggtagcaggttggacctttcatataatagagtatcgggccgaggcgagatcgacagagacgcgatgcgcgactcatcgttcgccgaggaaaaaataggggcattcacggtttgggcctgctatacatacaggactttacacatgctcgacgtgtttgatacagtagtaacgtagtaataaggttcagaagagatataaggggcgtcaagtgggccatgttaccgatcgggatacttggtagcgcagcgaagcgatacccgacggttaggcgagtgaagcaataaatgtcgttaatcctcttcttccgagtcgtcaccgtcgaagccaaagatggttttgagatccctcaagctggcgttgtccgtggccttcccggctagggaagcattgaccagcgcagtcttactacgctctaagtaaattgcaggggatagagcatgtcagcagaaaatcaatccgaaagctcaacgagaaacatacgaatcttgaggatgcgcttttcgatcgtattcttaacgatgaaccgagtcacgaacaccggcttggtctggccgagacgatgcactctgtcgatcgcttggctaccaagatgagtcgagatcagtgcgggaaagtagtcaagggttcgctcgatgctttacctctctacagcctcattccctgaccaggaggaattagaggtctcaattcagctaattgtcatttctgcctccaagacgacagtactcacaccactgatcgagcagaatgacgtgattcgcagccgtcctacaaacaatatgaagcgattgagcatactggcaatgggcgcagatgactaagggactcgcaaattgagcccggttcctcccgctttaagcgaaatcaagaggacttgagagtttttgcttcgagagaaggcgtcgatcacggtgcctctgtctttctggctcattgagccgtcgaatcgcctaagtatgatatcataacgttcaaaaagcgcatcaagtgactctgaacaccaacactcacaggtaatcgatctgattgtcagaaaggaccggctcgacgagagacagcattgatgtaaactgtccgaaacagcagttcagtcaaggagcacgactgtatggatggacgaacctacctgcgagaagatgagtgctttgtaaagaggatcctgagtggcgatgtccttgagctttttgatgagagctttcagcttggtgctagtttggaagtcgaccttttgcagggctcgattgggctgtcccaacttcaaattaccagttgtattttgcctactttcacgcaaatctgtggtcttgaagggcttctcgcattctgggcatttgggcaccctgcctgcgtcctcctctttctcgacgtaagcagaagcacaatcacggcaactatgatcttgttttcagtcaagcgaatcgcaactgggtcgctgtctgtgttgccgtggcttacccggtatgatagcaaggcaagataacttccgcttcgacttcctcttgacaaaataggcacagccgggtctcgccactttcgagcgcctgtaaagtttgcgatgaaggagcgggctgagagtcctctttgtcggcatctggagcttcacttgcatcacgaccacttgtaaagtcggcaatgagctgcttgatgtcgtcactgtctcccgctttccctgagataatgtcgtccttgccttcatccccgccactgctcgccttgctcatgaccaataagggatggttgacggcttggcgtaacctgttcatcagctgtcagtggagacgactggcgaatgaatcggatctaggacacgcacctcatcaacatggccaggatcgaagtgtaggaagatttaacttgaccttcctggtcaagttcgatgaatttgcgccgcgatcggtcatatatggcatcataaattttcctttccgaacgtgaaaattccagcttttcgatggtaatctagggacacaggacaagggtcaacgctatgcgaagtcgcacacttctgaaaggatgtcaacctactgtcttgtccggcaagtctacaatgggcttgccatccttgtccttcatgttcttctctcgcctcaagaggcactgttcgaggatgaattggactacgtccaaagccttaggatcctggttcaggaacggctgcgtaatgaaagtacggaagaaaggatactgtccccagggctcgagtcgcaagaaatgaagcagggagtacaggtcttccagtcggttgacgatgggtgtccctattacagtcgcaagctgattagatcggtattgacgggaacgaagtcgctgacgcacctgtcaacgcccatcgcttttgtcccctcaaatcgtagcacgcctttgcacctttggactgtcgattcttgatcgtatgcgcttcatctgaatagtatctatcgatattagggtagccacgagaggcagtttcacgcggaacgacctaccgagcaccactcgaagccacgagactggaagggaaggcggtgaatatgcgccaagttggaaacaagcataacgagcttactatcgaacagccctccgccgtcatagttcgtcttgtccctattcttgatccatttgctatgttcgctcgccaaagttccgtacgaggtgatgatcacatccacccgctcatccctttccccaccgagcaggacgtctagatcgccccgttcattgccataccaaagtttggtagtgaggctgccctccacactcatcctgccgagttcttcctgccattgctgagctagagagacgggacagacgaccaaagtagcatggggtggtttgaccgcatcagccccgtccgcaggctgctgtttttgcacgggctgccactgtttcgacaacgttagctgtcggaatttgggtcgcttggccacaggctctccatcctcgtccagtacttcatcttcatccagcgagttcgggtcgacctcgccttccctgtttgtatggatcaaggatgcgagcatgctagggtagacgtaggtagtaaaaaccgggatcgatgcaaaacgccagaggaacgttacctaccaagtttttcccattcctaccacaagcatgcagaaagcttaatggccgatgtatctcgtagtcatccgcccatcgtccgacttacccatggaatcggcgagaatgccacctctagcccgggtattcgctctaggaaatgacaagctgagatccccatcgtaagggctgcgtgacggaagtcgaattgtcaaccgagcgctttgcgccgaagggctccggacggctcttacttgaaatagaacgtttcaccattgccatctgcagagactgcaacctcgtcctcgtccagatcgatttctatcggtcctcccgcctgttcgttctcgtccttgaaaccgtacctacaccggatcgtcctcctcgttagccaagttctggagcgagaggcgacattgatgctcctcactcttcccaaagcggatgcatggattgatctcgcatgttagcttctcctttctccaggcctgccatccagctggtatccggcctaaatcagccgagatcttcgggtcacgagatctacacgaccacttaccccaacgcttgcttctgatacggcctcaaggtgtatgtaaacgtgtcgggcgggtccatctcctccatcatcgcgtcaagcctttgtgcactgtctcgcgatcggcaaagatgagcgggtccaggctgtaaccccttcatgccagaaagcttaccgtttatagatatcttccagctcgttcagttgactctcgttgagtaattctgcttcatccccgctttccacctcggaatcctcttcgatttctccctcattcgctttgcccttggccggcttgacttttttcgttggactaacagctcgcgaccctgatcccgacgccgtttgactgctcgccctcgtaccattcaccctacccttggccgatgccttgcccttgtctggcgagacgctacgtgattgttccttgcgcttgacatatgccggcattcccgttgccgattcgccaaagtgtgccaaggcgtcttcattgatcaggcctttccccttggccttttgagctttcgtcagagcgctcgatcgaattggtttgatccccatgcggtctacaataagagttcgttttagcctcttgagcaatggttatttcgagaccaaccacggactgaatagcttgtccagggcagccttccgcaatctcatccgcctctcgtcttcggtctctccttgctgttgccagaatcctcctgctcttgacctttcctcctcgtcgcctgattttcctgcctgcatgacgtgttcctcgaatgcttttttcgtgaggtagaccttgaggttgagaaggatgtcacagccgacggtcaagctcgctggcgcatcgacgacggtcccagacagctcgatcattccgggatcgagcagtggggagatgaacgccgcatcaccggcaggtagacgaccgacttcgaagcccctatcattgttgaacctcacgatcgtctcgacctttttgaccgatttcgccaccgacgcgcttgctggtcccttcttgccgctggcgaacccgccgagtgtcgactgtttggcagccccgccgcccttgatcacctttccattcttgatcacggtcgtcgccttgcctgccgtctttcctttggcccgctctttctctgctttttcctcatccctttccgcctgcgtcttgtttcgttccactatgatgttggctccgttggtgatgtagcctttccccttgttgagcgacaatccgctgcaatagaatgatccgatgtaacccctgtcgaacgatgccagcttggcagaagcctgtgtcataggaggagcctcggctcttgaagagctagctttcggggacgctttacgtttcgctggcctggaagacggtccggccgtcggttttggcttttccggggtagacaagatgacaatgtcatcatcgctatcatcgctcagtgtgtcgaccctcgtaaactctctcttctttagcacgtccactggctttttctcgcgagggtggggggtcgtaggtgcaggcaagtcatcggtcgagcggaatccatagacgtcctgcgacgaggacaactttcgggtatttgtcggtttgacggctggtcgatcctcttcctcctcgtctgacgaatcttgcaggaacagagcttccttcggtgaagcgagcggggggtcaacctccatgttgaatgaggagatctatcactacgtagcaggagactgtggccgtttgtattgatggttaaagaggtatgaaaagtaaaaagaggtcgatttgctacgaggtatgatttcggcgagctgctcttcccaacgcgatcggggcaatcggtgatgagctttacaatttagcgaaatgaaggtgatgcgcgtgatgcatggatgatgagatgatatgatataggatgacgcgacgcgtaccccccaccccccgcgtcgaacgaggttgccctccacgtttcacgtttcgatcgtcgtggtcgaccgatttgatcacagcttcagcttctccgttgcgactcccctggtaatgcctgcaatacgaatccatcgtgggctcgacgcgtctactcccggacccgggaggtcgaatctataggagacccgccgatggtgcccatgcttcacaaagagtaaatgccaacggttgccatctgccagaaccgcgccctcttctcatggtgattcacccatgccgcagaagtcctgtcactgtcaacttcgcccctgccgcttcagcctcccttgaactcctccttcgctctcaaggctgttcagggcgctcgaactcacgcgcgggagcagtgaatgaaaatcgtatgtgagccagcgaggtttggtgtcccactgtaacggatgatcatcatggttcgtctcatcttgctcggccggttcacatgcatctcggaaaattcagggactcgagggtatttaatcacagtcactgacaggacgaacgacctgcgtgtaccaatgcggatccgacttttctcggggcctttttcgggcaagaggaacacgccggaggtgtcaaacctgctaccgagctgactatccattacccatccctttcgcccatcaacgtagactggtccattcgaatgcgccagtgagacatctcgacaccgtacatcagcatccagagaccagcgaccttacattggcacattcagattgacgcccagtcccccttggtcgttgtttctatcccactcgtgtccaaaccttcatgctcaacaaggctaacatctcgtcactcaacctacccgttatgacattcttgatccccgttgccagaaactttctcggatgtatggatgcatcccgctagattccttgtaaacggctgtgtacaaaaatgacgctggggttcacctacatgggcggcaacatctgatcaggtcagtattcccttttctcggtcgaacgaccgctttataagtctccacccagcaggagatatgatctctgcagtctaccagatctcttatcgtccatgacacttggtcatcagtatcgtgtatcctgatggttcttttacgttcgacttttgagagaactagatatgccatcgagtcgtccagcaggtcactctggctttgggtgagagtcggtggaggggtttgaaatctgattccggttgatgcgcgacgcgacctagtagtgggatcagatcggttatcggatcttgcgagggtgccgcacctcgtgaggaggaggaggatctcggggaagtctcgagcgaggacgaggtctgtcgtccgtccgagcccggtagaccatcaccatgaacaggcaagttcgataagagcgtgttccgtaccagtgaatgtgtactttgagcgaatggtaggcgatcggatggagatgacgaacggtgcggaacgcgactgcgatggtagcgtgacgcggcgtggtgagttccatagtatcgctttgaaagctccatgagaagctacagggtgtgggtgagcatggtcaactttcatgttcgtccgttccctcgctcgctcaggatttgtattgcctggtggtagagcagcaaaagcaagcgtcccggccgaggtggtctggatctgtatggaccgttgtccgttggattcatcatcatgatcatgatcatgatcatgattccgtttattttagcttccgaaagcgaaacgcagagtggtggtggccgccgccgtggttctgcctgctgctccccccccgctgccctgccgcgccctcgctgtcgcttagccttctctgtccctcaccctcacccccccaaaccaccacagcgaatgggtcgttttccatcgttgggtgtgtgagagggtgccccaggtcgcgtgcttattcatcacgtctcgtctcgctgtctttcccacttgacttcgataggtttgacaagatcaccgctcgaatcaacaagttgtcctacggtcttgacagcaactttgtcgagcctatcgagtaagccctacttgtcacattgcatacgaaacccaaaacccgccgtcctaatcctactcgaacgcgacccgttcaggattaccaaaaaggtcgccgctggggttcaccagggagtgaccactgtcgagctcgacaacctcgctgccgagacggccgcatacctgacgaccaagcacccggactatgcgatcctcgccgcgaggatcgccatctccaacttgcacaaggagaccaagaagacgttcagtaccgtcgtgcacgatctttacacttggggtgagtcggggctggattccaagccaaggtgatgagcgggagatgttgatgtggttttcgggtcgtcatagtcaatcccaagaatggtcgaccggctcccatgatctcggaagagacttacgaggccatcatggagaacaaggacgtgcttgatagcgccatcatctacgaccgtgatttccagtacaactacgtgagtttctcgtcgtcgaacccttggtcggcttggccaagactgagcaacccttctgatcgtgaacgtgtcgattctcgtgaatctagtttggtttcaagaccctcgagcgatcttacttgctccgaatcgacggcaagatcgccgagcgtcctcagcacatgatcatgcgtgtcgctgttgggatctggggaaagaacgtcgacaaggtcatcgagacttacaacctcatgagcgagaggtactttacccacgcttcccctaccgtgagccccatgtagcccttggagaacgagaatgttcgtttagctgacacgccgcacgtcggggacttgacatagctcttcaacgctggtactcctcacccccagctctcgtcgtgcttcttggtcgccatgaaggacgactcgatcgagggcatctacgacacgctcaagacgtgtgccatgatctccaagacggccggtgggatcggtctcaacattcacaacatccgagccaaggggtcgtacattgccggaaccaatgggtactcgaacggtatcgtccccatgctgagggcttatgacgctaccgctcgttacgtcgaccaaggtggtaacaagcgacccggtgcctttgcgtgagtcgagaatgaattagtgaactcgtcggtcgatgccagcgggactgactcgacgatcccgttgcagcatctacctcgagccttggcacgccgacgtgttcgactttatcgaccttcgaaagaaccacggtaaagaggaagtccgagctcgagacctcttttacgctctctggattcccgaccttttcatgcgtcgtgtagaggccgacggcgagtggaccttgatgtgtcccaacgattgccccggcttggccgaagttcacggtaaaaaattcgacgaactgtacgaaaagtacgagagccagggcaagggaaagaagacgatcaaggcgcaaaagctttggtacgccatcttggacgctcagaccgagactggtggacctttcatgctgtacaaggatgccgccaatggtgagtcgagtcggtcgcgcgggcaaagtggcatgtcaactcacgccctttaccttgacatcgatccggtcgacagccaaatcgaaccagcaaaacttgggaacgatcaagtcgtccaacttgtgtactgagattattgagtactcggctccggacgaggtcgccgtctgcaacttggcttccctcgcgcttcccgcgttcatcaacaacggaaagtacgacttcaagaagcttcatgccgtcacaaaggtcgtcaccaagaacctgaacagggtcatcgacgtcaactactaccccgtcatcgaggccaagaactcgaacatgcgtcatcgacccatcggtctcggtgtccagggtcttgccgacacgttcatggccttgaggatggcattcgacggtcccgccgctcgtcagctcaacttgcagatcttcgagaccatctaccacgccgctctcgagtcgtcttgtgagattgcccaggaagacggtcactactcgtcttaccccggttcgcccgcctctgagggtaggctgcagtacgacctttggggagtgaccccttccaacctctgggactggtcctcgctcaaggctgatatcgctcagcacggtctccgaaactcgctcttggtcgcgcccatgccgaccgcgtcgacttcgcagatcttgggatggaacgagtgtttcgagccctacacgagcaacatttacacccgacgagtgttggctggagagttccaggtcgtttgcccctggttgttgagggatctcgtcaacatgggactgtgggacgatgacatgaagaacaggatgtgagtcgaagggttcctctggacttggttccggaacgatcgctgaccctcgtgaacccgctcaccagtatcgcgcacggaggttccgtccagaacattcccggtatccctgccgaattcaaggcgatctacaagaccgtctgggagatcagtcagaaggcggtcatcgacctcgccgccgatcgaggtgcctttatcgaccagtctcaatcgctcaacattcacttgaccaacccttcgatgggtcaattgacctcgatgcacttctacggatggaagaagggtctcaagacgggaatgtactacttgaggactcgaccggccgtgaacgccattcagtttacgttggatcatagcatggtcaagggtgagtgctgggacgacttgggcttggttcccttctctattacaaaggctgacttcgacttgatctgatgccacctacagaggccgaggctagcaagcgagctgcacgagctgcgaccctcgctcccgcccccgttcccgtcgcgcctgcccccatcgcctcggtcgtgccagtcaccccccagcgagccacggcatccgccatcaacccggcctttgccaagctcgcgctcaacgactcgaactcgggcgtcgcctcgccgaccccttcgcatctgggcaagctgtcaccgccgaccagcccgtcgtcaccctcgccaccttcggacggagaggaggtaacctacgaagaggccaaaaagcgtgcggccgagcgggcagaggccgctttacagtgcagtatcaccaatcgtgatgcctgtgagatgtgcagtgtacgtagtttgttattgtgcggcgagtctcgaatgtcgggctgacttgcgttttggactggattttacagggatgatgcggactacgtgactcttccagcctgatttagtgtacacaccctcgaccatcatcatcttgtattccaccagttagatcatcttgttctcggacttgtattgactcgtatattttaatgccttacgtgacctggagtggcggttcgaacgcgtttttgctgcttgatgacctcgctctcacattccctgaatatgggatgacggattgccgtccggtgtctcctatttgctttagaatatacttcgatcgagaggttggcattccgtctctgacgatgcaggaaggaaggtgcacatggatcgaattccgctttcattaacgctcaggagcaggctgtacggctactgttcggatcgcggagtaaggtgatttatcccacacggtcgctctggtctctcgatgatacaacatccatgatagctcgaacacacaacgatccggtttagcgtttcaagtcctcaagcgatagttcttaacgacgacgccgttgggcttgagaaacctcaaggctccccttactcggtcacctctgtatcaccttcatatcgcctgtcggtccgtcggccgtgacacatcgcagatcgcgcctcgcgccacggggggttgactactttcccctctctccgcgttcccaggagagccgaacgatgaaacggggtgcttcccctggttaacgacccgaccgccgacccgcgacccgaatttggggggttgttgcaacggttatccttgcctctaatttttcatgagttgctcgtggtcgacccggatctttgggttcacgtttatctgaacggacaggggtcgggtcttgtcgcggctttttccttgatcatgttttcatgtacggcgggccggtctgtcttgccagcaccaaaggggctgtgctaggtccgtcatccatcgtgatctctgtgttgtttgtttgttttccgcgttttagcgcgaactagtgagtgtacagtagaactcactttgaaaagagtgtgagatggcagagtgggggccaaacagcaagcaggggttgaagaccttttatcaagcgaggtgccgcacgcatgatcggagacgggtcatgaaggagtgtgattcatctttgacctctacccttttttgtttcaactggccaactgccgcagctcgagccctccccttctgccctcccccttgaaccatctcgttgcaccgcctccggccccgtgttgttggctattttctcgcgaccatctctcggctgaccccgagaaaacaaacaacttccggtgttttggcgccggggtaagctcgctccacctaggtcattccttcctctcccatccccccgttttctcgcctgtgatcgccttttgaaatccacgggaccgagatctggttgtccgacctggaatccatcgacgacgacgacgactgaaaaatagagcaactgattgccccggcattattgaacaccgcattcccccaaaagttcatcatcgcgcgatcactttcaagaatcaagcaaagtctgggtgtgacatcatttttcgacctagaaccaccatctcctctcttgacaatctcgaactttccccgccaaaagaccctttgacaggatcagacacggcgacagacgcccagcaacgacgacgaacacgacgaccagcacgtaacgcatcaacaagacactagtagtagtcactctcacgacccccttcttgaccccgacctcgcctccgtttcgatcggatcctccccgatatgaacagcaaccaccaccaacaacaacaacctaatcccaacgcctatcggcaacacgcccctcccaacctcgacctcaacctgaacctcggacaacctctggacgccgctgaagcctacgtccggacccctcctcgagccgcctatcagtacaggtcggaggaagacgaccaggatttgaccccgagccagccgcactttcagcgagacggtggggatttcatctcgacgggacctaccccggaaccaggtcgagagtgagcttccggggctcgaaagaccattcacacaacttttcctcgtctatgatccgctcatatgatctgtctctccttctctctttcactcttttgacttgacgtccgaccaatcgttgacagaccatcgatcgacgagacgcaccgcaactttgcataccgagctcaaccttccatgacctcgctcaatcaatccacgtctaccaccggaacgcgtgacgaccatctcaacccggcgccctcgcagaccaacttgcaccgggtctacaccaacgattcccaccactctcggtccccgttgacgaccccgcatatcgattcccaacccgctttccaaggtccgagctcgatgaaccaggccccgaccatccgaccgatcaaggagaccgactacgggcagccgaaccattcttccccgcagatgagacaggggacgacttaccctcccgggcagtatcactcgatccctctgaacgacgggatgggcgagaaagcggcgggtgtggatgagaggggtaggaagcgggggatcgcctggggcggggctgaccgatggagcaggaacgggaccaaggaaggtgagtccgacgtgctgctccgacgatcaggagtgtgtgcgctcgcccggcttccgtccgtccgactgatcaccttgaccccccctcccccccccctcgttaaacacatagagctggacctctccgcacaagaagccaaccaaaactcggtctcttcccgtggctctcgtcctcaatcccgttcccgtccgtcctcggtctttcgcggtgcgttcggaaacatggccgggacaggcgggacggggaccagtacccctcgtagcgaatgggaagggttcgagttcaaccccgctacggcaaggaaagaggaactgcggtacgccgagggagatgtggggaggagcaagtttgccaagggttacttttacctgttgaacaagtcgatcgtcacccgatggttcctctacatcttccccatcttggtggtgagtcccgggtcgtgtcggagagggccggtcggtgaggtactcaatccggtctttccttttgattgtcgttgcggtagctcttgtggattcccggtatcgtttggctcgcaggcgttcgaagcgctaaaatctggtccgtcaacctcgtaagtactcgctcgtccgtagtctccaacttggcttgtcgtgctcactcgacccgcccccattttgcagctatactggtctatttggctcactgtcctttggggaggctggtgggcggccgtcgctgtcggtatgctcgttcccaagatcctacaagccaccctcgtcgccatcgtgcccagcatgaggcaatggatccaaatctttagtagtctgatcaggaacgtcgctctgatcctgtggaccttggcgatgtgggtctcgttcaccccgttgatgtgagtccgctcgtgccgtcgattactctcgcgtcatgggctgcggctgaacattgccctctgtcggcactcagcatcaaccattacgatggcgaccaagcggctagctcgaggtccaccttgagcctcgtcgccaacttgctattcggtctcttcctctcctcgctcgtcatcgggggcgagaaacttatcgtccaactcatcgcctaccgattccaccaggactcgtacgaggatcggattcgcgaccaaaagttgcagatcaggagtttggtcacgttgtacatcaacagtaccgatattccgggcaggagggacaccttgaccgaagcggacatgaacagaaagtcgagggatcccaaaaagcacattcgaaaggccttgaagggactcaagaatgccgctcagactacgaccaggtgagtgtcactgttcagaacctcagattgctactgcgggactcactgggttgactttgcgatcaaagtgcacttggaaacgtcgcaaccgagatctcgggacaatccgtcttgcagaccaactcgccgtacaacaaggtcactgccgctctcgcttctgccaacaagtccaaggctctcgctcgacgactattttactctttccgaagggaaggaagcgacgtcgtattgctccgtgatatcgctcgattcttccccaatgaagaggcggccgaagtcgcttttgccgtgttcgacagagacgagaatggtgatgctacccgggacgagtttgacatggccaccattcagattcaccgtgaaaaactcgctctggaagcttcgatgcgggatctcgatggagccgtccgacgactcgacgacgtgggtttcgaagcgaacattgacggagcgtcctggccgtagctgacccctactcgacgcgtctctttccagattttcatggtcatcgttttggtcatcgtcgtactgatcatggcagccatggtgacgaccaagttgaccaccttggtcacttcggctggtacctttgtgcttggtaagtgacttgttgctcgtcatcgttccagctactagactctcacacgaatccttgcctcaggtctgtcttggttgatcggtactaccatgcaggaaatcctcggagcctggtaggtgcccttataatgtcgggatcccgagtccagcaactgacccgattctcgatcttactcagtatcttcctctttgtcaagcaccccttcgatgtcggtgatcgtgtcgattttgagtaagtcgagcttctggaaagagcctcttcggcgatgactaaagcgaacactttgcagcggcaactcgtacgtcgtcgcttcgatgcaattgatgagcacgaccttccgccgcgtcgatggaagcgtaagttgccataccgtccggcgactctgtgaccagagctcatcgtaatttgctggcatagtacacctacatcggaaacgacattctgcgaagcaaactcattcagaacatccgccgatctggacccatctctgagagctttacgtgagtcgcctcttcgaactcatgccggccgctcgagaaactcgctgacatggtgattacaggttcgaggtggactttgcgaccgatttcaagtcgttggttgagttgcgtgacaagatgttgatcttcttgcaagagaaccgacgggactacatgccggtctttgatggtcagcatttccccgattgcctttttttccactttacttaaattgaatgcttgcgtcccgcagtggtcgtcgattcgttccctgagcagggcaagcttgttctcaaggctgatatcaagtacaagacgaactggcaggaaggtgctctcaaggtacagaggcgaaacaagtggatctgcgctctcaagaatgcgtgagtctcgactgtgtatccgtttgctctgaagccgtgttgacggtgttgtcaatgttacagcttggccgactgtcacgtatacggacctgccggcgccggtaaccctacgcctcctcctgcggaccctgtcgcctacaccttggttccctacgagccccccgcgcctgctagttccgaagaccgaagcctggaatcacctcctcccgactttttggccgccactaccggcgccgagcacggagctgctctgctggatcaacgcgaggtcgtcaacgatgcgagcggagacatctttgacgaccaggtcgaggtgagttgtgtcgcatcgcctcgcctcgtgatgaagtagcggcattgacgccgttcacaacactcccagttccacgacagcaactcggcgttcgctacgacggctgccaatacgccgggagcggccgctgccttgaggcaccgtcgcgtgcccggtgactcgatcgagatggctgcctcgtcgacccgtcctcgtgtctaagccgacaagcccgtcgaatcgtaccgcctgtcaagtctcatgacatccagtcatccagcgcgatgaaactcttgaaaccctctctttaaacgcccaccaggatctacgatctacgacatcaacatccatgccccgtgtctctcctctttaggctcgtcacccacgaaaaagccgatggcccctcaccctcacggtgtgacggcggtatatcgtcatgacagatgtgttctcgattatcactacctagatgatgctcttgcatttggaaatatatacattttcttgcattctcttggcgtctctacctgtatcgcggttccgagctggtctgactcctatacctcgctggctccgggctttcaggcaggggcggtcgaatttctctaaccaggaccgcgccgttttttctcatccaaacaccctcttgatcccctttctcaacccgctggccacatcctccctgacgtccgcccaccattcccacacccatctcgcctgcctggccttgttcccatcgatccaatcacgataaaactcggcgaggacgatttccttctgttcggcgtgtcgagcgagttgggccggggtggacgtgctcggtgagggaggtggaccgaggagggagagtctgtgcgcttgatgagcctcgaagaggagattagtcttggcctgattgtggatggagggaaatcgagttcgagcagggcaagacggtgtcagtcgagtctgttccggtcgcatcacgctggacaaggcttggtctggtccggcctggccaggatgacctgctcacccaaaactcgtgattcttcctatccaccgcctcctttctcaacctctcggccaggtcctcccccgtccttctatccgagcccgtcttgtccctccctgaagaagagtccgaggaaaactctgcgatcgagtagggcgtataatcggtccctgcgcgacccgaggctgatgctggccgggatgtcgaggaagaggggagcgggcggtagatgatcggccggaggttcgagatcgggtccgaactatccagtcgaagagagttggggggagatcagtcatagagaacgtgtcctgacgaggctgggtcaagcttacggtccgatgaggttgccgcctaaatcgggttcattacgcccagtagcgggtggagtgttcagcttggtggacctgctcgagaggcatcgcgtttgctccgtgacggtcgtgctcctgactcgacctcgaaggtaccgtaagaaagtaggattcatttcgtttcgagtgagcgagtgattgtatacggtcaagattgtgggtcgatgaatcggggtcgatgtcattcaaacgtgtttgctcttgtgatcaggtcgtgatgatcggggaggtctgtctggcgttcagctgagcttaagatgatttttcgctctaggtagttggtcgatttcacaagtcgatcgcgacgtcgatcaccgtttatacgacaacaacgggacgtcttttcgcacaagtatgaacagctttccccaggtcgtgcgtagccaatgtatcaccccgtgcggagatatctatcgagttcaattcgctgtccgaccgagtctacccctactcctgattcccaaagttgcctgcccgctcccgggactgcgcgtcatagctagctagcgagatcgtcaaagcgggaggatatgaacctcgttggaccgtccatatataactaggcatacatcgttcattcttctacatcaccatcaccaccagtcagcatcggtgatctaatactacctgccactgtccatagcaaaagtcattacacatcgctttatagcaccaccgatcgcccaccccgatccttccggcctgacgttccatacgttccatgcgttccccactcaagatggccccaacgggctccaaactacccctcctcatgtcactctcgaaactcgtatctgcatcccccgtcatcctcaaccaagtcatctcgacggcatccaaggaaaagggtggagtcatccatccggaagatcctcccgattcggctaggttctacctcaagttgggtgtctccgcagcactcgtcctgttgggtggagtctttgcagggtgagtcgaccgacaacctctttgtcgccctggggacctattggcattatactataccgtgatcgccatcgatgaacatgctgacatcggtgcccccactcgtagtctcaccttggccttgatgggttctgacgacatgcaccttcgagtccttgcgcagtcgtcctcggacccggccgagaagaagcacgcctcgaaagtcctcaaactccttcaacggggccgacactgggttctcgtcgtcttgctcctcagcaacgtcgtaagtcctcatcatggcgatcatctctgtgcctctcccggtctgggcttacaaggaagcacgttcgtccccgatcagatcgtcaacgaatcgctgccgatctttttggacagcgttctcggaggaggtatcgccgccgtcctcgtctctactgcaagtgccacccgtccatgatgatcgttcggtggtaaatgaagctcactacgtcgatcgtgtccgtcgaacccttcatcagaccatgattgtcattttcggagagatcattcctcaggtgaatagcccggcttcaggggaaagaagaagaaaaaaacgcgcgcatcgactcggcattgaatcatcgtctgactgattcgtcttgatcatttcgcctacgtctcagagtatctgtgtgcgatacggtcttcagatcggtggagcttgtgcaccctttgtgctggccctgatgttcctcatgggtgagtcaccccctcgctgctgccatgaacggcgcaaccgagatcctggggctcagcatctccttgatcttgtcctcgcgcgcgtatcgaaccgcatcacgtcgctttctgctttattcacgggaaacagccccgatcgcttggccgatcgccaagttgctcgactgggccttgggtgccgacgagggacatacgtgagtttcttcgttcacccctgagatcccgcttcgatctcgcaggctgataccccggtgacactcggcagcttccgcaaggccgagttgaagacctttttgcagttccacagggaaggtaccgaacccttgagggatgatgagattaccattctgaacggtgtcttgtcgttgaacgagaagaaggcttcccagatcatgacccccatcaaggtgagccgtcaaccccccgctcgttgacccgcaccttgactgatgagatacggcatgatgttatgatggaacaggacgtcttgaccctcgccaccgatcgaatcttggatcataacttgttggatcacatcttgttgagcgggttcagccgaatccccgttcacgagcccggtcagaaggacaactttgtcggtatgcttctcgtaaaaaaggtagggattctaggtgataccgggggaaaagccccccttggctgtaggaagctgatgctcacttgacggctcgcacgaattgcacacagttgattagttacaacccagagacttgctccaaggtcggcgagttccagctcctctcccttcccgaagctaggccggacatcaactgtaagcccggatccagcccggccgggctatcgtgccgagaaatgtttgctcaagtttctgaaacttccttttatctgcaggtttccaagtaagtcgaccacggccctcggactggtgctgaaacgaagacggcgctaagtgattccccgctttgtacctaggctctggactacttccagaccggccgagcgcatttgctcttgatcaccgaaaaccctggtgctgctcgaggagccctcgggattgtcagctgtatgtcaagcctgccggaattcagatttcgcctgatactgactcgatcctttcttgcgcgacgtcgacagtggaagatctggtcgaggagtgagcctgcgaactgcatccatttcgatgcagccgagctgacgctgttgcgttccgatcaggattattggcgaagagatcatcgacgagactgatcgatacatggacaatcagtctaagaaggcggccaagaggcaaggaacggctgctgtcatgcgtgagttactggagcttggaaaaagcccacagagatggcgcacagggtcgcacagcgctaagagcacggctgattttcgccaatatcacacaggcgggatcattgagcgtcacaagaacgtaagtttatattatgactggccttccacgatttctctctgatttccccctatcgcctgcagaccgtacacattgtttcgcgcactcattcgccgaccccggtcgaaggtcgtctgatcgagatcgatggtgaggagtaccaagtcacttcggagactcctggaggtgagcctgctatctcgtccacaacctgggcgactacagcgctcaaattgcgcgaattctcccagtccatgcaacggaacaggaatgcttcatcgtcgcccctcacgctgacggaaagtaaacccgcgtccgatcatcggcgccatcgggaacgctgggaacccgtcaaaaccctgcacaggaaaggacaccacgtcttttcaaagcctttacgacggactagttgcaacaactcgagggggatacacgtcatgcattgctccactaataaccatacctcggcgtatcgaccaaaattttgcgattctttgcgatatataccacacttgttgtgctgttttgtcatatgcatcgatctcactgaaagcacaggatgtgttgaagactcggtttccgaaagagaccacttatccctgcagaattagatttctgtattgacacgttagggatgtcagttcagattcatcgctattcgtgcctacactacagtaggccggccccgaactcacgctcgctccaggatcttgcgttcaccagcatctgtcgctactgcgacgtcaaagggagccagacccatcgcgcgacgaccttcctcgctcagaatgttttcggtccgccctttaccctcgaaagcgctctccccaaccccacctgggaaatcggggggaggcacgcccgccaaatactgctctctttgatctcttatgtatttagcgttcgcttcggtcagggggaccgaagggatatataagaccgacgccgcgttctttccctgattcgaagcctccaccgaatggatcccgtctgcgtaccaaaagacgcaatcgcctggtgcgacctttttcatcgagaccatcgtcgtgtcaagctcgagatgaggatgcgtctcatcggagaattcctgtgatcgaccgagtggcgagccagggaaatcggtgctttccaagtctagagtccagttatctgatgcgaggtattccttgcgagagacagcggtccttggcttgatcgagctgatgagagtcgtaagtcaattgatggaaatttgtagtcgtcccgtctccatcactcaccggaagaaaggacgaagcatcatgtatgcagagctttctttgatggcagggaacactttcaaggtgccctcgttgggcccggtgtgtgacagtgacgtccagccttggagtgctcggaacactccgcctgtatcagggaaagaaggattgataagggatctcgaaaacgatcttcatcggatatatactcacaagcccccggtccatcgtacagattggtgttggcctcaggccgagaagctgcaggagccgagagatccggaggacgagtgaatgtaaatatcccgagactgtttgttatttcgccctctagtgctgacctatatcccaaggatcgtgctccctccatcttccttcaaagatcgccttgtatgactgcctgtacagcgggtcctcccaccgctctacgcttcccccatcacagtgcgggccgagagcgaaccggctatcgccgggtcgtcggatcctcaaccggtcggcatagctcagaggctgattgaaagaaacggcgctcgagttggtcgatttcttgttccatagtgagaggaggaaccgttgtacatctagttgagcgggatgagaacgggcttcgagttgcgctttgctccagctatcgaggcgtacgtcgggtgagcacgagcgttgtctgcaagtcaaatggttatacactcactaaagctcatatacggctttatcgtcctcgggaaaccctttgactttgggattcatctggatgtacgacttgatgctctcgagccattccaatgcctgtcgtgtttaccatgaatcggtaagaaatctgttttgaccaggcatattatggtcttagctgaccgacctttgcctcggggacaacgcttctgaccaccaagcatccccgtttcttgacctcgtcgatatccgactgctctaatccgttctttatgtcggcatatgacacgtcgggcacgatctggagagggtagcaagaagaggatcagacctattgtgcttgattgctatcatcttgaaaccgaaaatggccttacatcagaccccttgctgctgatctcccgtgtcgtctggtccagctcttttacgagatctttccaggaagaagataacgcttgcctggcgttctccgagccggcgatttcgctgtgacgagctgactgagaacgagctggcggatctccgagcgagccacagctttacccaccgtttcaggtcggagaatcgacttggtagcgctacagctttctcgccagacaatgaagcgaatactgaagcgatggtaccttccgctctgggagcctttttcgggacgaccgcattgacaagctcgtcgacggcctttcccagtgaaccgcctatagatgtggcatacgaacggcgttgatgatagcgtgcaatagtaacgagccgcataacgtcgagtctgctcagatctttcggtcagatctttgttgcgccctttagcgagatttgcaagagggtatctccagccactatcaaagccgagtttcaaccatggatctgaactcagtagagatctcgtcgaataaacaggggtaattatcgtcgacatggacctctcggatcgctctcgaccgagtcaaacacgaggcggttccgtgagcaacgccgaagtttgagcgagatcaagagtcatccgaccgacatcttgaatctcttgctcgtgaccccttcctgcccaagcatttcttaccttttatggtaccatggtaccaaaggaatggcattacattccgtcacggcctcaatcgatatagtcgatctcgacacgtgtacttgtacaactcggtacctatccgacctttcgccgtttcctcggacctccatccccgccggcaccacctgcaccatctccaccaccgccgccaaacgctcccttggcgaacggtcgactcttcttctccttcccggcaaccttcttttgcttcttctcgatcgccttcttgatcgcgcgcttccctccctcggcttgcaacgcctcgaaacgagccttgagaaggagatccttcttctcccctatcaatatgagcaaactcagcgtcagatgtatccgtcgggcatgcgaacgcatcatgactgacctcgcttgagatgaaacgtcccctttccatccttggcccgctccttttgctcttgtttgacctttttcataacctccctctccctctccgcctttctcgcgacatccaacctcgtcctcgcccggttgacttctctctcgagctgttcacgttctgcgatcctatcctcgcgttcgtgtcgaggagacgtgcgttcacgtttctgagcgagctgaagggcggatcgcaagttctggtattcctcctcgatcaacttggggacgaacgagtaggacgaggctgtgaggttggtatcggtgttaccggcagacatcgagctgaatcgagggtctcttcgttcctgttcatccagcgtttcgatcgtcagtatacgccatggtatggaaagctgcttttgttcatgctcacaatcttttccggctcaatggcgttccttttccgggtgaccatcctcttggcgctcatgaccatcggtgcatgcttgtcaatcctcttcagcctctccttctcctcctccctcctctgctgacgatctttctcctcttccctctcttctcgcctctcccttctgatcgcccaaccattatcacgcccagattcctctcgcccatcatccgaccctgactcttcaggatcagatacggtcacgttcaacgccttgcccttgacccgctgcatggccgctagtcgtcttttgatgtcgttcatccgtttagcttttgccgagtcggacagcccggacattgaagtggtcgtctctccagaagcgtcagactcggcgtccgaatcgttggccttttgcttctgtagctttgattgtgctttccggagtagcgagagagggacttgttcgaggtctgcgttcaggatcagaagagaagtgagattgggatcgagtggtgcagaagagatcggccgacgacttacctttttgcagtttcgcctacgcaatgtacgatgaatttggtcaagcaagaggtatggatatcgcttgcaagacactcaccatctgagctttcgaatttccagatttcctagcctggtgtctggcttgctcatcagaatcatcctcgtccccatcgtcttcttctccatcgccgtcgctctccgcatcggtgtactcgtcttccattccctccatttcatcttcctcccagatggcgactcccgtcccgcgttcctcctcatcttcatcgactaaatcagctccggtcgcttcatcatccgttccttcttcttcttcttcttcttcatcatcgtcgtcatcatcatcatattgtgatcgtacaggtgcagctcttgtggtccccttgctggagctgggtctcgctcgtcggtcgtggtcgaactcgtcttccgaatccgaatcaaagtttggcatcggaagtttcgacaccgaggccgtctgtttccgtttctgaacggccatttgagaagacttctatagcttcacaaagagaggaatcctggcgtatttacagtcgactcgacttatagggcagcataagcacacttgctcatgttcagtttgtgcttttgatgatggccgactgaaattcaaggtggaggcggatcgagagagtcgagggcggaagcaattcaaagatacccgtgacgcggacattgaaaatagctcgaaccaaaatgtcctcgacatgaaacatcaaagctacagccgtgacatcgctacttgtactgtcgcatcacaacatctttaaacttctcggcgacatcgtaatcaaatttggaattattgaatcctcgctctgttggctcaagctggaatcgcgctcgcccaggttttgtgacaacgttcttcaatccaagtgatgcaatccgccatgatgacggcattggcccgcaattcttcatcgctcatcatgtgtcgaatggcctacgacgatcaggaaggggataggaggtcagtttcaaagcaatcaacttcactagcccgccgcccgatgatccagtctactcgccacaatcatcacgtgatgaacacccgggtacgactgttccatcttgtcctcgctagacacgccgtccaaccagcgccatgcggtcctcgctttggttagccagtccatctctccatatgctatacataaggctgcgagacgtgtgtcaacgggccgaccagagactttcgggaaacccgtcgacacggacgcgctttgatatttttcgcctcgttctgaagccttttgtaagcctggacgagagaggccgcggtagctgctctcatcttgccgttgtagatcagagctgaatgatggccggttttgagcggcagataccaggttacaacagtacttgctcacgatcttgggcccattgctgctcgtagctgtcgcaccaatagtgccgtcctgtggagacgaatgatgctcagtacgaagtctgtctcgcccaatcctttgttagcgtgcagaccataagtcgaccagaacattccccgagtgccaaaatatcgacccgccagcctcaagatcggtatctgcaacctgttcgggccataataataatcgactgtatttgcagatctcagtcatttgggcgtgctcgtaatgtctcagaatcctgaagacacactgatcggggccatagcataagcgccctccaatttgaccccatccacaccgtctccttcaaagtactttggataatcgaggagaaatgacaggactgccgtcccgcctatacatgtgcctgagatgaatgtcttctttacgggttcatctttcgtctgggactggtggtcatgcaggacgagcttgattaccgacgtaaagagggatgggtgctcgacatgtcccggcaatctaagagggaatccatcgttagtatcagcgtgactatcttgagagggatcgatgtgtttacccggttgagcgtccatgctgtagaagggaagcgggataagcatcaacaccacgactgatactgactgtccaatcgtagtacggcacctaccccaggaagatccagaaggatgactctgtatccagcttcaaggagatactgtgctataagagcgcagcatccgctgaattcgagcgatagctggttagtcgttttgcctgcctcggagcagctcgagtttgttgtaaggtcttacgtatactggcgatatcctggcagttatcggtgtccatgtagtcagagggatggaactgacatcgccaaggtcaatcgcttaccatgattcagtagcacatccacgttctttgggatcaccgagcctctcaacttctccggtttgtacgtccacgttttataataggtccaagtgccggtcgtcatcctgtccagttcggtttgcacaagcttcacgttctcacttgctagagcgacatctcgaggaaagggagagttcccgtcaacaaacactcttctcctggtcaagaggacgtccggatccagatctaggctcagttctagattctcagaaggttcggtccgataactcccaacttggaagcttttgaagtgtttcgcaggggcaagccaccttccataggcttggttgatacgatcaatagcccgaacatgtgggccagttaccatatgacagtatccaactcacttgggtcttgcaaaactggcttcgtcatcttggcggaatacctcggtcctttcctttggaccgcgtcacgaacggtattgggttacggttcaggtcggccaagttccccaatactatgagtgcgcatagcagcgtttcagacggagcgtgcagactgagctccctgcaggcaacgtatatatatattgtagacgactagacgaccgacatgtggcgctgttatttatcgtgatcgtccgccatcgagctgtgcaataacctttcgatcatctgatgaccggggatcatcagctgactctgcatccgagccgaaatctcggaacctttgggtggcgtcttcgcgacgatcaatctcgggtccgagcgacggatacccatgaagttggcgaagcgacgtcgaggtcggtcgatcgttttatgatctgtgagaagcgcttccgtcggtcgcaaactggtagtcatattcctgtactcgtgtaacccagctctccgaagttgaggcacatgctaatctataacaactgtatgtttactgcaaccgcttgacatcacccacggctcgatcgctaagtagggtagctcgtgcagcctccaacccttgtcgagctacctgatccagaggcaatcttcgcgcgagaccagcgatcaaaccaccgacgagagaatcacctgcgccagtgctcgagacgacctgctccagcttggagggtgagtagtgcgacagcctgagtactggtttctccatctgaccgattgcaaaatcccggaagtcatttggcgaatcatgctcgactctccgagctcccgcttggcctcgcggtccgtctcgcgcggcgtcaacgatgcccaaatggagcagtccatcctggccgcatttgacccaaagatttccgacccagggcagaaggctgaccatcatctgagcgacaccggcgttgacaagccagccgagatcgtgctctttgatattcgaaagccgttcaataccgttacgccagttggcgctgagtcgcaattcggcgatatactcaaaccattcttctgtctcaaacagaccgagtcgttgcaactttccgtacaactccttgacttccaataaattgggggagaagtggctgagtaagcgagcttccgatgtgggcgcaggaagattcgaccggagggccggtatcatccgttccatcttgggaagggaagtcgggtcgaacattgctatgaatgatttggaaaagacccaatcagttgttattctctgctgatgccagactgagcactaactatgaatgccatttcgctggcaagtctgcagaagagcgctcaatacctcttcgcgcaggttggcgtcaaatccgacaatctcgggctgatatcgctcgatcgctgtgaggacctataccaacagatcttctttcagcacgaggtgccggatgtcagtcggtgagtaaaatcaaacgtacctcctcactcgtgatcgattctgcaatgtccatatcagcgatcccggcgataagacccccgtcattgctgaggatcaagttgcaaaccgccgtgttagctccatcctcttcccgacggatcaagccgtccgtcctcatatccgaggtgcccatctcggtctcgagaatcgttccgaaggtatcagcatgtagtgaggagtcggcctggttgtccgatcgtgaccttgtgccaatagccgagaccagcaagacctcgttcgggtccgagagccgagtagcacactcggcgatattccggccgactcctcccggggtgaactggactgccccagggaccgtcgtgtgcaagatcgaacccgtcgacggcctcgcctgagcggtaacatcgattgctgccgagccgaataccagcaccctaggtctaggcaggtcttgagcgttcgatcgactgggcgtcttcccttgagatggacctgctactggtgaagtaggaatgacaggcgcgacgagctagaattttgcatgacgatggcatttgtcaattctttcaccctggtcatacgatacaacggctgggatgtcagacggggctaacttttgctgacgatgacgagacttccgatttcaagcggagcaactcttgtgccaacttggcgccgaccctagcattgttctcgataagcgcgatatctgtcaatgcgagtgatattatgagcgtccatcgcgccccacctaagtcatccgtctggacttactactctctagagctttaccctgcgtaagctctccgacgcgcttcagcaaccaaggagtaacctccttgcccctcttatcaacgccgtgttcgacactctccctgacggcgtgttcgacggctttctggattttagcaccttgtgcttcgtattccgccgggatgggcgtcgcaaagagctgagcagcgcgcaaagagggaggcaagacgtgcagcgaggtgtctgcgagcaagagaatgaggagtgtattatcagcggggacaccgctggttatagatagcgtggtcgctactgacgaagcagtttggcggcttcttccggagtccgaacatagtaaggactctattatcgggccaatcagcttgaaactcgatcgcgtcaatactggaccttgaatggctgctcactttgaaaccggaaaccctcgtatagaaagccggaaagtcgttagtctccccaatggtcgagacattcactccaagggtttcctattatcgagcagctctgccatgtttcagctcggtttgggtcgacgcctggataaagctgttagctgaagactcacgagcacctcgagggtgagtccgagatcgaggatggatttggctcctgcacagacgacgcccatgggggtctttgacagctcttgcaggtccgcagagatgtccatacctgtatcgcgtcaccaacgcctcggcgaatcgatcagatctccgcgcaacagccgtgaacgctggaaatgaactcactgctctgcgctcctcggtgtaccccgccaattccgcctgtgacgaacgtctcgatcccgacctggtgagagagcagcatcgttcccgctacggtagtacctccatccagcctgctggtcaccccgaaagccagatcccttctcgaaaccttgatactctttttcgagacttctgggtcggcgagtctttcgagttggccacggtcgagaccgatatggatgcggccttgcacgagggcgatcgtagcggggatgacggtattatccgatgtatcccggatgatcttttcgagcgataatgccgtgtccaggttggcggggtaaggcatacctggttcgaaaacgctctgaaatctcagcttgtccgcgattatcggggttcgacgatgtgtgatctgactgaccatgggtgacgatggccgtctccagggcgatcacacctttactgccagactccaaagcatgctcaatctcttcggatacgacgagtctgtttccctgtattggcaaagggcaaggtcggcggtcatgttcttccccccttacgaacgccgagagaggactgacccattctttccgagcggtcgctagtctcgagatcccccttgtctgcgacgccgaggaggatactggacgaattcttcgcaagatggacctgtgcatgatatgggttgctagatgcggctattaccctgatgcagtggtgtactagatatcatcgaccgattatgataatgatatgttcgatggttcatgacttttgaggttgacccgacctcggccacgcggtcaccgccgacgggaagcgaccacgaatccagccatcatccaacatgatatcgtagcgtcatagtatcatctactcttcatcataaccgtaaggcaagccatatcgagcaatacattcttgataattttgttttgattcatcacggtttgttctctgggcaatgacaggcgagtccgagcgaaggacatgcgacgctcactttcgaccacggccaacacctcgcacgacaaggatgaacctcttgtgtacatctcggttaagcccacccgaccattcttcttctcgggagagacctttgaagccaagattaccctagaaaatgtccgtccgaagaatgctcgaaatggctctggggtcagaacggctatcgatcctcgggatcgagcaagagctagcatcgatgggtatgcacagagaaacacggcaggacctgatcatcgtcggtcttctacttcaaactttggcccgagacgtcttggcctcattggtaaacacgaagatgcacaggaccaggaagtcgaggtgcccacgaaagtggacgaagctacatccttacctgtgacgccaaagaggaaattgcacctcgctggaaggagtcagagcgtcgattttgacagtctacgggagcaagaccttgccagaattcctggtcgtaagcagaatcctctgaagtctcatctggattcgtttactaaacgtctcacgtctgccgctcaaaagcatggacaggtgccttcccaagatctcatccgcatgctaggcaaatctccatagcgaccatcccgtcatcacccgctcaatccgtgtttggcgatggagcgacgtcgcccacctctcctggagccccgagtcctatgtctcgccattccggattggagcgcatcgaagaaggagggacgagtgggcaggaccgtccaggagacgaaatgggtgacgggtcggcggacagaccgatgatgcagaggagcggatcttcctcctcagagttttcggggacgagcaacgcagctttcggtctatctcgtctatctttcgatgcgaatgtcgctcgaagtcatcgtcaatccgcgtcattctctcgttcggcatctgcattacgtttacagaccgccagcctggacgacggctccctcacgatcctctgggcgcaaacccggctcgtgggtcgattcacaccttcctccgcctatatccctccggaccccttgctcccgctcaaatcactcatgttacatcaacccgtcggctcgggctccctgccttccttttccacatccaccggccaggccgccggttccccctcaagtcccgctttgtcccggagcggttcccgctggaatttgtccttcggaacagggaccctcgctggacaaggggaccctaccctcacgggaagtctctggggcttggctaaagggttaatcggcagcgggtctggcgggagtttggaagaggagcgaaggaaagtgtggaacagccgggaacttcccgtcctcgaaagcatgaagagcctgctcggcgtggaaatcagactaggacctcacgagagtcgatcgtgtgagtcgacaatcctttcgaggttcacgagctaccaaaaaatgggactgacttgtccattgttacagtcacctataccttgaaattgcccgacacgctagcaccgacttttcgcgggaaagcgcttcgcttcgcctacgagttgtccttgtctctgaatattgcttcttcggggctgggcacatcagcaaagcaaaaaatacacgaagtgacggttcctatcaaggtctatccttctatagatggcaagtcgctcctctcgctattcgatccggttcgtacggtgcttgactgacgttgattgtgcatttgaacggataccgtttttagcaatctctggccgacctggcgtctatgatatattggacccgatcgttcacactactgaccaaggaatagtgaccgactgcagggacgagcctcgcaaggtggtcaaagcagatcggccgcgagataggcagcgcgaactacgacggctccaattgtacgcagagcgtctgagcgatccttcttcttcgtcaggagcgcaagaggagaccgtcgatgaagccgaagcatccctaagcgaagacagatcctccgcagacgagatcatcacgcagcagatccggtcttcaaagccagcccatttcgacatacacaagcatggagaaccggttgcagagattgatcttgtccgatcggcgtatcgggccggcgacgctatcaccggggtcgtcaaagtcaaccaggagggatggcgttatcaagtcctcaaggtgggtacccaggctgtatgaggtggagcgttcaatgctgactcgacctgactcgataggttgccgccactctgttcaccgaggaaataattcctgaatcgcttttgcctccgtcaccggcccacggcgacgtgatagcccctgtcctgcgcaagaccgtagcgaacgacagcaacggtttcgcttcgcatctgcgtcgcctcagcttccgcctcgatatacccacagatatcacgccaacatcaaccttgaaagccggaccagagggcgaccagggtggggtcacttgggcaatgcaagtccattttctgatgcggaaacgctcgacccgacatcaccgttcttccccatctatcaatctacgtcccgaaacccaccaggcaacatccggtaacaaacacaacgataaacacatcgaccggactgaagtcgtccactgtacgattcccgtcaccacataccccggagagcggcaaatcggacctatagagcagggtttagagctcgccggatgatagagcttccagcgacatgtcagctgaagcacatctttcaaacattcgaaatttgtcagcgagctcggcccttctatttcgccctataacgaccacgggcattgcatgagtcttgatccattgcaacagaatgtgttcgaaaccggccaaaacatgaacagctgataaaaccgcgggctcaaaagcctcgacgacgcggtgtgtcatcccgatactcaggggacacagcagcatatgtgatagagttagttgcctgccaaaagttaaaaactccttcctatcggtatttaaccggaagaccagcggtgaatagccctcgagcctctggatgagatcgcgttggggtctcggatagtggaattcagagcagagccaagaggatgacggtgtggatctcggagtcttgcaaaaggcggcaggaacggtcaatttcgaagtgtctttttcttcggcccgagttggcttcacattctccatcatcgtttgactggcagttccagcttacaagcgacggcgagctttctgtccctgatcatccgcaagtgttggaaatatgagacagaaatgcaagttgacaacagaaacaaattgccggattgagtgccgaattgtcttcaaagatcatctagctgctacaactacactggaaaccaagcatttgtctgctaccgatcgagcataaccgcttctcctccttttgagcatccgacaattcggtttcggctgataacagttccccaccgtacggctcaaagggatgagtagccatctatcgttcaaaccgatcagcccagagaagcatgccaaccagacgccaaatgacagctcacacgcatgatatcgccgagcaactttcttcgagcgggaccgctgccatgctcgagctttttgatcgtctcctccaacaaccactgacgaagcacgaaccggggattcaccgagcgcatctcggcggatctttgctcttcccacttgtcgccagcgcgttcccacatgacgcgatcctgctcaatggcggccgcatactgcttgaaccatggcctgagggcgtctttgccttcggaccgcttgttctgtttggccgtgtcgaccatacggtcgaggatgacgtcgaactccgccgagcgtccgtcttcgagcatgctaggctggaaagcgcagagcgcacgtagagccgagtgaaagtcgatttcaatcgtcgccaagatctgcaagaatgggtcgatgacggtcgacaggtcgtcgcgatctggcttgtccgcgagtccaaagcgctgcgtggaaagggtttgcgctgcgatcagctcgtcgagtttttcattgcgggttcgaataggacttgccttggcgtacaactgcttgtactcggtcctgaatgcctgcattgcggccttttcgacctcttccccgtaggcgattccagtagctctccactggtccatcatctcttcgtcggcgtcctcggcccaccctgccgtgactgccttgtcggtctcttgttcggcgccaatgacttcggctagtgttgagacgagctggttcatggcaaagagaatcatactaggttgtttctataggggcatccagaggtcatgagcttgcaagtgatgtcgtgcaggggactaccatcccttaccctgtagtcataacgtccctcgtgatccgagtggtctattcagcgttggcgtcagcatcgagctctttcagcttcgagtacaagcctctgcatccccggtagacctactgcagatgtgatacgggtcatagacgtccatgaaggcgtatggacctaatagcgcggctccgaatcatcagcaactgcaaactccgtcatccatcactgttcaattagctcaccatagtcgatcgtcagaccgagcacgctgacgttatcagtgttgatgacaccgtgacaaaagccatacacctatacacgaatcgaaagagtgtcaaccggccagctgcatcgagcgcactcgaacccggcactgacctgccaggcggctaccatcctagcattccttaatgccgactccatgacgagcttcttgccccacggctcgtcctccttgaggccgagatccaagccgcctggcccgctgacccattcgccgaggatcctcaacccctcaaaatccctctccaagctcctcgacccacctccaccgggcataccgagcatgaagaattgcatgttcatcgcttcctcgggcgggtttaagatttcaaagttgcctaccctcacaaaactaggagcgacccgggcgaggaggctggagggttccggtccgttttctcgttggactaggagttggtcttccgggtgggtgaggagagcgagcgatcgggacgtaggtatgtgaagcgcggccatagctgagggacaaaagagggaaatacgatgaaaccccgactcgggcttagcaaggacagagttgtcgggtcggcgcatgctccaagctcaccctctgcacagaggtactccctgaccccgctcctcagcacggccaatccatcggccgacctagagaacggggtcctccccgatcccttgagctgaatctcctgtcgaccaccttctggcgaagtcgtttccactgcgtaccggatcgagcttcgattcagccgatcgatcccccttggtatgacgtacacgacaacgaccttgacgtgtgcttacatatcgagatcgcacgaccgtccccgagctgcccggcccattgtccaaactgatgccccgcgtacctcgaactccatggtccatacccatcgtcggaccgcaagacttttctccccgagacgacgtccaagagctctttccccttgctgtccaattcgatatcatcctcatccttggcctgtcgggatggctgatcgtgttgaccggactgtcccgtgtaggcgagagcgttacctacatccaggtgtggtaacgattcgtccagacacttttccgagacgcccaatagttcaggcctccagaccgacctcggcccgctcgtctttgcttgcaatcccgacgcgttccctgtcgatccgaccggctcgtcgtacgtatcgaacctcttcaaccattcttccaccccgagttgttcttcgccggcctccttgttggcccgggggaggcgataagggaacgccagcgggagcggggtcaccctcgcccaatgtccggctttagaaaacgtcctcgagcgtctctgatcgacgtacggggtcggactcgggtcgtctggctcggtgaggttgataggggagagatgagcttgcagggtcttgcttggcaaggggagacgggtaaaagggactcgggtggacatggtacggcggtggttgggtgtggcgaagatagatgtcgtggatctgtttgtcgcggatcgatgcatcgagcgatatgatatgaccggtgtcggattatgaaacggcgcggtggtcacggataccctgcctctgtgaatatttatataccgtctcttgatcctctcgtcagcagttgatgtcagccttttttgaactcgagtggttggttgctgacggaacaacctgcaactggatggtcgctcgctcgactttgtgtgcgccaaaagtgaaatgtgatgtcgtcatcaaacgaaaacgccaagatgatgaggaggaggatggtggcaaaagggtcatcaccgtcgtcgtcctcctatagggataccaggcaacccaagaccacaacgagtacactcatactgccagccgtctcatccatgcaatgtccaggtatcttgctcatcggggaccatatccttccatacgtcttatagaccgggctccttgttctccattacaacgctactacccgtcgccacttcaagcactctagtcgattctcagctcccggcgagctagctcaattccagatgttttggaaaggatcatcatccaatgtctttttctgctgttgctgctgctgctgcggcgtcgtcgacgcgcctccaaaggcgccgaatccggtatccaagatcggagcgggcaaggctgtgcccccccagacgtcctgagacgatacaaagtggtttcctgcggccgatgtcgacgacgacgacgtgttgttcggacgagcctgctgagcctggtatggttgctgttgatattgcggtggtgaggtcgccatcgccggtgtcgtcttgaccgcgccctgtgaattctgcatcgaatcagcgtcccgtcttgcaagcttcgactctgctcacacacgagatactcaccgtcgtcgtagaactccaaggatcgcttcccatccccattcctgcaaacccactcgtcatcgctccgatcccggcagtactggcctgagcgctggggttgaggctcgcgctcgaggtgaccccgctaccgttgccccaactcgcatacgcctgttgaggattactctggaccaccggtggggcattgaaactttcctgcccgtagactgccgggcgctgttgctgctgctgctggtactgttgctgttgttgtcctccgctcgagaagtccccaaacccgctcgtctgcctcgtcatccccggtgcacccgctcccgcattcgacggcgctgcggaaaagagcgacaagatgtcccgattactcgtcttggctgccgcaccacccgagctcgccgcagagggtggtcggaaatccaggtcaaacaggctggacgagggcggttgggtgggtttcgacgaggcttgggaggtcgcctgtacgggagcggcgggtgtggtcgtcgaggtggtcgatgctcctgcctgtgtgggtcgattcccggggacggcgggcgcagcagtcgtcgacgtcgctgtggcgggagcagaaaagtctccgaaatcgccagacaagaggtccacctcgggctgcttctgcgttcgtgtcggcgtagggactgcagcagccgcggtcgatcttcctgtcctagaggacatgctagacaaaagaggatgttgtgtcgtcctccccgacggttgtggttgttgttgctgctgctgctgtggtaggggtacggctgaacccgagccgttccttccaccgttgtgcgaatcatacctcggcggttcaccctgctcctgaccttgcccttgttggtccaacacggcgggatcccggggtggatgatcggaaaggacccatttccgggattcatacttgctcctgatgaacgattcgattttgctgttgttccggtggggaatgaaatatcataccatgcacgacgatggataacgagtatgatcagtaccggacgattctcgcaagcgatttttcaaaggaatgagcgactgactggtcgggagggtgatgccccggtttgagatgagcctcccagtacaagttggcccgtgtgttcccccactttttcatcgactgggatcgtcatcaagcgaacagatcgtcagtatcagtcatgtgtatcctaggttccgcaagaatgaatgcgcgagtgaacgagtcggaagaggaggaggcactgacatccatctgctcgggttgccaaatatcaaggtcgatcgatttgaccttgctgatgtgcgtccccatggacctgtgtatccctgaacaccggatacagaggtataccccgctatgatcgataatgatcaacggtgagagcagggtcggtttggttcgattcgattcgagctgtaagcgggatggacgggaggaggcgagagggtcgtatggcttacagattccaagatgcccatctcgcatctatccgggtgacgagttcggcgcaccatcgcacgatcgtttcagcataggggacgatcgatcgacgagtataaaagtccccaggacgacttgccgtttttcttgcaatcggcacagttcttgttaccttcctgcctgacaagatctctcaacgtcctcgcgttcctttccgttgtggccttgtctgtcgtgtccgtgatcgcgatggttcagcaacgtggtctcgacaacaaacctgacagatgaactcaccttgacgagacatgattgaagaagtgttagtctggagtgggagagtcgagctcgaggttgtagatgagggtaggaacgaagagtagatcggcaggtcgtttgttatcatctcccccaaccctgacaccgctgtgactagctagcatagactactcgtcgtcgggacaacccaatacaactaacaaagttcattgggggaggaacctcgtattattgctcaacaacaaccccacctacaccatcatctcattagattcaagagcagagattctgttcgaggtctactgtgactacaaggaaacagtcggaaggacaaaaggccggacagttcattctcaatatggagaccgtagcacctagcgacacgccgttccgtgagcccgaccccattcactcctccccccaaccccgcacaccaacgctgtactgacgccccatcacacagaggcgctcatgcaatctttcaccttgatcctcgtctccgagatcggcgacaagacgttcctcatcgctgccatcatggccacgcgacatccccggttgaccgtgttttcaggagcgttcgcgagtttgctggtcatgagcgtcttgagcgccgcgatgggcaaagtcatcctcggtctcataccagccgtgagtcgttccagagagatcctgcatgtcgtatgggaggtcctgatttttgactcgggatgcgtccttcgctgctcgacagaggtatactcaatttgtcgtacgtacctgtaatcccccttgacgtgttaccgatcccacgctcatccgacaccttgcatgccacaggctgccttcctcttcctagtctttggtattaggatgatccaggaaggcctggccatcccctctggaaactctcatatccaggaagagatgcgcgaggtggaagacgagctcgaggaggaagaagggatgatggatttccacggcaggcgagaagcgctcgagatggaagaaggtgtcgggaccggtagccacccccttaagaaaggcccgactatccacacccatcctctctctggacctcggaaatccaaaacgtcatcatcctcatcctcatcgtcgtcgagaacgctcaaagacaggctctcggccgcggacctcaagaaccggacccggaacttttgttccctcttcttctcgcccgtctttgcgcaggcgttcatcctcacttttctgggcgaatggggggatcgtagtcaaatcgctacgatcgcgctcgctggagccaacgtgagccaccttggccttgatcgccctgaattccgtcggaagaggatcgcaggctcatctcccatctcattcttccctttttcgattttcgatggcagagcgtatcgatcgtggcgttcgggacgatcgtcgggcacgccgtgtgtaccgccggggccgtcatcgggggtcggttgctttccacaaagatcagcgtgcggcatagtgagtcacctcgatcttgtactttgacatcttgcccctgttccctctctcccgcctgcgtccgccatcctcgctctgcgcgccgattcggctggcccgatatatgtagagacgacgtactgaccttgttccctcgttttgcgcgttaaaaaaaacagtcactttgatcggtgcggccgctttcttgttctttgccggggtctacttttacgagggttggtacggggattccgagctgatcgcttaagtcgttccgagcgagctcgctcagttcaatccagtgggaggtgggctctcgaggcaggacgttgcgatgatgggcatgcggggggcaggcatcggtgatgtattggttagacgacaagcatggcggtattgcatagagatagacatcgaggagatactgtgtattgatcgtttgacgtccagcattccagctgatggtacctgtctgtcgttcatcgttatactcgtcatgccgcccggcgcggtaacatctgaaactcctttttcagtcccatcttggtcgtcaccgctgtcggcatacaatacactggatcgatatcctggagaccagggtatcctagcatggaaagacctatggcgagacattgttatcgtcagccttggagacgcaagcgggttgaacgacagaatatggctcaccagcaaggccgaagatggtatgaaagacgtctacccagtctcccggtcgatccgctattccccctccttcgagatcctgaaaatggaacaaaccgatcaggcgggatgaagtgcatcgaatagagacgacgaacttgcctgtgattctaggatgaattcggtgagcttatcctcgttaatccagtgaagtttgcccagaatggacagtgccgagagattccaccacgaataacaaacctgcagcagtagtgaagacactgcctcagcaaatctctcaagatcttttagacgccaataagcgcatagaaacttacatcttccagcttttctggccggccgttcaacccgccgttcggcagctgtcgttctgacaaccaccacgccagggtctcgacgtctaccaagtccagcctatccaagatggccagcgctgccacgcatacaaagactgtgtcccacaactcgtttcagctatcctgctcgactgggttatcactcgttcctcgtatatatcgcaactcactctgtccaccatgactctcgctcccagcgtccgagccgaaccctccgtcaaagttcctacaccgctcgatatgcccgacgaccaattctcttcctcttccattgtgggccgtgtcgagatctcctaggcgtccgagcagagacaaggccgagacgacgatgtacgagaaccgggtatctgtctctccccagcgatctccagcgacccggcccgtctcggggtgtatcagcgacaagaggactacggtttcattgatgttttagctcagagctgtgagcgatgcatagaagcaaagaaaaggctcacatttcaccagacggtcggtatcgacgacttggagactgtcttgaatggcgaggatttgtatcgccgacaatgtggagagcaagtgcccgtcgtgcttcggatgagctccaaacgctcctgaatcgttcgcattcggagatatttggcttaatgaacttttccattgataagggattcagcccttgacgcagaagtcggactgacccatctcttcatcccagcaggacatgacgtatcggaccatctcgtctcgatccagtgcgtcctgcctgcccattatgcacaacgcgacgagtccccagtagaccccattcatacggagatgttccgtcatgtggtaggccaagtcatctttatgctgcgagaggcatgaggacgagggatgagattagttcaaggatagggtcggtgtttgtgatgtcatctgatgacctaccgtgtcgagctgctggatataccggacgtgcagatcgatgtcgaggttcttgagatcgggcatggtcactgcttggacaattctcggattgtgcgacgtatgccgatgtgttattgcgctcttgcgaaagcatggacggctcatgcatacagggaacctagaacaaccagatgtgacatccaacccgtattctgcccggtatgacctcgggggaattctcgctgcaatccatcaaagcgtgtccgaccttaaactggattacgcatattgaactgctggtcgtaacagcacatcgtcgcctatgagttctgactactcgaggaggacggacaagccgtctatcgtccctattccgacctacacgtccttccgtcttaggtgtacacatcgatactacaacgttcgtattcttcagaattctcccatagtcacgattctcagtccttcaatctggcccaatcagcgacgggcagcggtcacctctcccatggtttcagacatgggattatgagcggcgaccttcagtgctttatctatgtatgaacggccgacatcagctgcagcgatagcacatcgatgacgcgattgtacttactcttgaccctggtcgagtataaaaactcggcgaccacctcgccttcccgcatcatcccgcccgtaccgcccatcatgacctgaccggcaaacgcagggttgaccccgggtccctgtaccgtcgcgcctccaccggccgctagagcatccctccaatgacgttgagcccgctcggcaaagacctttttcgccatgtcgatatcggcgaggatgggcacgaaagggtccacgtcgtcttccgagttgaagcttggggtaggcgagggcgaagagcgggtattacggtacgtgacagccaacgaggttcccggcggcagtggtttcctgctggaacgtcgtagggtaggtggagaatcgggattctcgccctgaccatcgtcggccttgacgtccgtaccatcgccgtcgagagcagctgtggcatcgggattgatagggttctcacttcctcttgctgcagaactggtcgcatcctgcacagcggtttgaccgtccgattccttctctttccgtttcctctcctcttcttccgccatcgtgatgctttcctcgatagctgcggctaccatgctggtcgcagtcgaccgtctcttggtagcacgaccttctctgtccctcggtgaggcttgatgcgacgcgtctttgccgttcgaacctttccctgcttgtatcgtgttcggtactagattagttccagccatccctggtccaggtagcatggtctgtataggctcaggctcgtcgatgaaaagtagccgagctgcacgatttgagagtcaacgggtgacccggggcgagctctttgcggatctcggacgagactcacgatccgtcgcctttgcattcacgtcccatacagagtgtatactaccgaacccgaatttgggaatggcatgattccgctccaggtaacttgacaccgtctcgtggtcgaatgcggtaaaatcgagctgcaaacggggtcaaatcggttgtaagcgatagatagcggcagttctactgcgtgcgatgggtctagcaatactctacttacctggggatggatatcttcggggttgacccctgcacctggaccgatcatcatgccatgaccgaacccatcactgccgatatgaccaggagcgaccgctcccgaggcggcttgcgaccgtctcgcgttctcggcttcgatctgactgctgtcctttctccgtttcacgcctctccgggaagtagaaaccgatggctgcgcattggcgaattcttccatgcttgtttctaggtattggtacgtatgccatgcggggtcgacctcggcaagtcttcgtgggtcgttcatggtccagctcactgggtagagcaaagtggtgaggagagaaggagaccacgttcgggtacctggattggacagcaacgatatgaaagttaccctatacccttatgtggttttgaaaggcaaagtattgctgtcaaagatggatgtaatgcggcggtcgagaacggaggttcgggtacgcaaagaggtaaagtaaggtaaggtgttcgggatagcgatggacaaagtgacgggggattcaagttagcggaagctaattttggttttcggaagtaaaatgacctaggcgacacccgacctcgtcgagatagagtcgtttgatcacttttgatcgcaaatatcgaccggtcaacgacctcagtccgaagtggagtacgggcgacaacttatttgcggctcagagataaaagctcaggttattacttgcttggtcgcaaggtacgcgtcggcagccaggtaagcctaccaaagacggccacccgctcacagatcagaggcttgtactgatcccgcttcatcccccttggcgtttcgtcaggcttgattagtgcgcatgtaccacatccctctgagcaccctcgaccatcgagacgtcgccttctcgactcttctaccaaaggaaagtacgagctcttcttcctcgtcttcggcctctcgagcgtctaccatacacacgatgatgagccggggtcgatcgatctctagctcgccggacccgctcgggggaactccgcggacgagcacccagagcacagatggggtgaacgaggaagcgcggccaccggacctcgttcatctagactacgatcagggtctatcgggggcttcatcacgggtgaaaggtagcaaagacggtttgatcgggaccggggtgggggaagaggaggattcccgagagacgccttcttttgaaggggtcggcttcagctcgagttacggacctcggatcgacgtcgatcatgaacattccgaggccaagagatcagcccgactgggatatccacagaaatcggctccccttgaccaagatgtcgacctgagtcaagcggatcagaaggaccggaagtcatcctccaggcttaacaggccaccgccgaaaacatcatccccaagcctcgtaacttgtagctttctaaaagctctccccgtatcaggtgggctactatcaacaatactcgtcactgcctcagattcacgccgcaggtattctggtccgatcgatcgaccccgagagccaaagcaagcgcctccaccgccaccgaggtcaagagcggcacgggtgcgagatcgattgagttcccggatcatcgcgccaccgaggagcctggcatttccaggtgaacccacagttaactcgatcctagacgcgaaactagcggtcgaagaaaatccgttcaacacgaaaggcgtatcgatgccgtctttagtgacgacctcggatacaggtcgatccccgtttatagtctgcagggacggtagccgaaacccattcgaggaagaggaagacgattctatcgaagcgctacggaaccacggtccggtccggtcgtcccaccaaagagacgactccagggcgttccttcaccgattgccagggagctcgaccttgttcggttcagacttcacgagggagagttcgagggtggaggaaggcggcgagcaggttgttgatctaggggaagatttcgaattggagttggacacaggcatggacgttcagtcgatggaagtaggcggaccggatagtgacgttcaacttggaggaggattgacgaggaggaaaagatctggggcggaggattcgcatgaaggtgtacaaagtaggttcgacgacaagccagatctttccatcgattcgctaactgacgacccgtcatcaggttttcgttccgtctcaaaagaccgaccgatacgaacatcatcagcgcgtctatcggataagaatcgcgcccttgatcccaatcccaatcccatataccaccaagcagagccgaccagatccacgcgttcatacgtcgagcaagatccggatcaccgaacgatatcaacccgacgcgctccgcgccgaaaaccgtccttcgtttacaaacctcctggccgaagaagcgcaatggcgcgacagtcgtccgcacagaaccttgacagcgacgactgtgaattacctagcctagaggagcctggattgccggcagtcccccggagtgatttgcgagtcgatagacggaagcggactcaagcatatgtcgaatatgagaattctgatgaagaccgtgtcgaaggtcccccaccgcgaaagagaaaaaaggagctcgtcaaagtcaatgaaagggagcgatcaagacagctcgagaaggtaagtatctcaggtagcacagcagtgagatcgttcttgatctaagaaatttcagaatgcacagacggaatccgagagaaaggcgatggaagaacgtctgcgcgagattcaggagattgatgcttacagtctggaggtggtttacgacgtttgaatcggaatgcttgtcgtgctctcgaaagggagcttttcatatgtcctgcgaagattgtcacggtgtttgatcgtgtgtgagtgatagtctgatttttgtccaatgattccgtgtcttcgcgcaatcacaattgtaggatcgttcaagaatggatgcccattcatccgtcctgattttcggaaagaaactatccgacagctagcaagactgcgccaccttatctaaaatgcccataaattccctcgtaggttctttcagctcgcctccttgaacttagattctggacgtgttcggtcgttacaggcgccccaaaccctggtggcgcgctctgagaccgctaacatcgcgctattcacagacggagatttcctttgctatcggcgtcatggtccactggatactgctgttgatgcaagggaattgatggtgcaaagcggcagatttcctgtcgcggtacctctcgtacggtactgaacttgttcatcaatgtcattgtctgcagaaagtctcattgcgcaggtcatgtgccaatactaccgtctttcgcgatagtctcgatcccgcgttcgatcgcttccaccgtatcctctttccctatctctatctcgatcacgatctctatcccggtcgtccctctgcctataccgatcgcccggacttctcgacctcggtctccgtcgatcatcatcacgtcgatccttctccgttcctctcctatcatcatcccgtcggtcacgatgatgatctcgtcgatcccgactcctttccctttcgcgcctttcccctcgaggtggttcgaacaccatgccataaccgccgctcccgccacctccacggggagccgaggcggatataccttcatacgaacgacctcctctcgagctgggtccagacaagcctctggacgctcctcggccgccgcggccaccacctcgacctcgaccattgacctggtataccccgttgatcttggagacggattgagagctgtaaaattgggggacgtgataatcagccaacacgtcttttcggatgtcgacgatcccgttcttcaaacacgcacaagtctacatagacacgcttgtcatcgatcaataccccgttcatcttgaaatacgcctatgacgaaccgcgagaacgattagcacgagcacgtagctggaaataatggaaaagactacccgactcaccgcctcggcctcttccttcttgtcaaactcgataaaggcgtattgtaatgagtcgcccgactttttatcacggatcacttcgcacgacaagatcgtgccgaaactgagccaaacggaccgatctcatcagcctagtcctgatctcgattccaaggatggcatacccggactcaccgactaaagatcaactcgaggtcctcgtccaccgtgaccgcgttcaggttggcgacgaacaggatattctctggcggcctgacgtgggcgaacggcaagtccccgatcatctccaacgtcaaggcgctcgcctctgcctggtttttccgatccatctcttcgagctcttcctgtgtctttccctgggtcggatcgatggattcggattcgtcgatacgaggtcggagggaaggatcatcaggcggccgcacgggggaaggaggttcagagagcccgtcgtccggatcgggaaacgggtcgtcgaggacttcgatatgatggaccctgatatccttgaggggtcttccgtccttgtccacataggcttcgttgatctgatccaggacttcctccccttcgacgactcgcccgaacacggcgtgcttgccgtcgaggtattcgattccttccttgagcgtgaagaagaactgactcccacacccgggcggtgaggtcggggcgacggccatgctcagggttcccttttgcgtgtgtttgagagagttgtgtatctcggggggaaagtatcgaggaggtgcggcggagcgcgagcgagactttcggtggtggtatgaagcgaacgattcgccgcccgttcccaatgccgatggatcaccggtctgcgcgataaagtccttgctaactatagggtgagaaatcgttctcagctcgacgggtgacgctgtgagttgagtcaaggagctcaccattaaagaacgcgttcaggccgtaatacttgaccttacacagtttgagaaagttggcgcatgttcgcggacacttgtcgacctcgagatcgacaacgatatctcccagtgaggtttccaccaggacagacatgacctactttgaaacaagtcgatgtatattgctcggtcaatgaaatgccatgcaggttcgatatgatcgacatcaagtagacaccttagcaacacttagagtagctatgaggtagctactacttgtttagggaaattggaaacgtgtcaggctggaaaacacggttaacctacccagctacctgagggttggggggccaaaagtcgaataatgggactaagatgtcaatcgtctcaatcccgcatctcctcgccgctcaaagtaatcaaatcacactcgtaggaatcgacacgatgaacccactagtatcgacatcgttactccggacgaccgccagtcgggtctcgggcacgacgaccacggcgcgacgatgcatctcgtcaacctcgtatcgacaatcccacatcggttctgcaccattgaccatccccgcttcggtcaccctcgaacttcccgcccactccctatctctctcatcgacatcgaccaactctcccatgcgatcgatcgccatcaccggtcctctcggtcgacatgaccttccgatcgctcacccggtcgtcctccatcctcctacaccggagaatccgaaccagctcagtgtgacggtgcagaacccggatgtgaaagcacaggcagctctatggggcttgacaagagcgctcttagggaacgccgtcgtaggagtttcagagggttaccgactcgtcctccgtctcgtcggtgtcgggtaccgagccaacgtcgaagagatccccccttcactccgtcgactcttgcttcaaccccgttcgcccacccataccccactcacgtcggaagaggcacccacggatcgtctcaacctcaagctcgggtacgctcatccgatctacgtggatatccccaagggaatcaccgtctccacgcctcagccaacgaggatcgtgctccagggtacggacaagcagaaactcggcctattcgctgccaaaatcaggcgatggaggaaacccgaaccttaccgaggaaaggtgagtcttcgctatgattcgatcatttcccgtatccatcgctcactgatctcttgacccccggttgatcgactccagggtatctttgtcggagacgagacgatcaagatcaaggatatcaagaagaaatagacgggatgtttgccacagcatcgaggcgcattccgatccttgtatctcgtctgcatctggatcgtgtgaatggcaccatgcatcatgtcatatccacaccatacatacacctgggcacttgacaatttcgagtttctttgacgtgcttgacgaccacagttcgaggatcgcgattgagcgcttgatggcagaattcttcactttcctttgacggggccgtcttgttgtatactgccatcctcaaagcaaagatgaaatccaacagagccatgtgactacgcaaaaacgagatgcttatacgaagggagccggaaaggaacggctcgcaggatcgccgaggccattgattagactgcgcccctggtccaggggaagcttgagatgtcatccgccatcaccacggcccgaaaggacatatctgagaccccctgtattcggtgttctcgtcaatatgcgttgagatttatataccacttgaattgtattcatattcgattgaactgtcgcgaatctcttagatcaaatcattacccttttcttacaatacattgctgagagatgataacaagcaatggactcagtggctcccgctaccacttccagacgcgtggcctccacttccagatgaactagaagagaacctcgcataatgcaagaagaaggcgccttgaacggccggctcgtataaaactttgccctcataatccgatagtgacacaacaatgacgatgttctttatcgttggcagatggtcgcggccgcaacaagtccgtggtaaaacgtccggtccagatctttcagcatcaaggaagcttgagacatcgtttggcatgggttctagctctaaacgaaagcctgcaagcaaagtgaaagcgctttcaggctgatatactccagcttggcgccctgctcgtcggtttagggggtgtacctcaaactgtgcgcacaacaatacagataagacgatgcaattcctttgatcgataagtttgttacaggacggtctcgaggttatgatacattctagcctgatgcggcatcggcaggatcgcgcgcatgcgcttactcggaagccctcttcatggacaccctgacgtgaccgcgaccgcctcggttggcacgagcgaaccaagggacataaacgagctcagtgtcgacggtttcccatttgcgagctggggttgaggcgttgaccgggcggtaaagatcgtcgccgtcttcggctaacgcgcggacaccggacttcgcaaccacagcgaccatcgattgaccctgaatctcgatctcgcgctcctcaagctcagtcttgtcggtcagacccactccctcaaagtgagggtggctagattcgatggcgtcgttgtcgaggtcctcggcgacgtagacgataggtcctcgagagacggtgagcgtgtcctggccggtcaaggggtgcgacgccaatagcctgataggcaagtccatcgtcgaggtcgcgcgcgcacagtggcccgcgttgaacgtgaggaaaccgtcagagtcgatttgtgccgatggcttgatctgcgcaatgccgacgatgttcagcttgacgtatcgacaggttgaagtttcagctcgtactgacctgcaagttgctcgcatagttgggcttggggacggtaatttcccatgaccaaccttcaggcgcgtccatgacccaagaagtttcacccttccacggcatacccgactgcatcgtgatggtggcgcgaccgttgggtagatcgatgctcctagtgcacgacatgtatagatacacgatgaccgagatcttcttggccgatttatcgacattgacgcgccaggtgtatcccccgagcatgcccaaagttctcgacaagttgggagggcagcagcagactgagaatcagtcacgctcgtcaaaatttgtgtcggtcatcgaggagcattattcgactctcaccttcgaaccagtccgctctgagggcagactcgtcgccaaacgtcgccagcctgttctcgtagctgaacgccttgccgtggagatccccaccgccgagcacggcgttgtacagacaaagttccatggtgtccctgaccttgccgttgagcttatggtagagcagcctttcgctcgtcatcatggccgcgattgatgcgcaagtttcggcatagcaaccgccctccttgatcgagacgggcaggtggtaggcgaattctgagaaaccttcccactgcaatgttgtcggattgaccggcatcaatcatcggttgacggacttcgaattcgaactcttcgagactcaccctcggctcggatccaaatcctcctgttacatacatcttgcggtcgaccgcatccgtccagagcctcttggcgtcttcgtagaatttacctcctaggtcggccgcagcagtgatcagatagaaagcccggaccgaatgaccaagaatgtcgttctgctcgtgcagcggcgtgtgggattgattgtaactgtcatcaagatgtccgaatcaggcatagagtttagactcgacacggatgctcatggcaaggggcttcgactcacgtctctggacacttcaggtccatcgttgtgggtagaggatcgctagccctcgatttcgcttcatacgggaaataactgacgccgtcctgatcttcccgcttcacaccacgggcttcgaggaggtaggtgccgaaatccaaatgcctcttttcccctgtcaacgcgtacaaccggaggacggcaagttccaattcggggtggccaggatagccgtgcttttgatcttggttgggtccaaagtgctggatgaagcagtcgacgttcttcacgggccaaaggggactcgcgattcaggtcagctttctgcgtctcacgataaactcgggccgaaccggaactcaccttgatcatgacgtccaggaacttgcgggatccactatatctgtaatgagccatcgaagcctccaaaagatgcccggcattgtctgtcatgtcggatatacgtggtgaataagctgtgcaccgtcggcttcaagtttcgtcacatcgacatgagtacttacacatttcgtgcatgtctcgcaagttcttgaacctcccctcagggtcgacgaccgtgaagtagatgttcaagtagccatccggctgctgggctttttcaatcaaatcgatgatatgattcatcgcttccagataagtggccgcttgcggggtatccctggtgtccgacgaagagaggaagtagcagacagcctcaatcctgtataatggcaagacattggagagttgatgatatcagcatacaagcgccacgggcgattctcgcaggacttgccatttcccgacatcgctctcccagaagagcgaaggtggaatcccgtcttgtctagaaacagcaccctttagaggcctgataccgtaagctggtcgccacttgaggtcgaacgcctcgtagctgccttgctttttcatctggtcgagttgcgtctgcagcactgtctcggcatacaaggctcgcaagcggccgaagaaactgtctttctcgaatgctgcaattgatgcagacgttgcgcttgtcagtctgggtcatcgtaaagcagcatattcggatcatcgactcactcgtagcatcaaaagacgtctgaggatgttgtagggattttccttcgtcgatccaggtcataatgaggggtcgttcgattttgcagtccttgcctaaatcagggtgttcaatagatcaatcgagtttcgtcgggtgtaaggagatcacgataggtgtcggtccgttcagaacaaggtactcggatgtaccatatatctttatacttagtctcgccatcgccatcgccgtacgtgttcaagtcgtcaagtcgaaagtcgtagctagaccgaggtggattatcggatattcctgcgcaaataggagcgagattcgagtgagaccgaactccggatcatttgcggggtaaaaccgttgcacatgcgggggggggcgggggcggggtagatcggcggcagataacagatccggatcggtcaaactttgtggcagcgagctaggcgatcgcggggactcgcggttccgatcaggtggtcgagtggaacctgtggagcgtcttcaagtcaatccaaattcgcgactacaccgcaggcttcatgcatatcagatcctgagagttgggaaggaatcccaggaaacgtcctagggtcaagggagaagctactcgacctgaacggccgtgcctgctcccggacatcatcccagatcgacgctgggccacgggacgggtctagacggcatttgcggaaggcacgattacgtcagggtgacagcagccgagctcggcgatcagcttccgggtcgatacggaagcagtgtaaacggaccggtccgagtaggtccatcgacttggatgtgcatcacagctagccgcgttggtaaacgatatatctgcctcacagctagcaaagctttcaagcagcaagcagacggtgatctatattcaagtgaagacctaagcgtcttcgagtcgaagcctcctctgcgtagaaatctccggacagaacctctgcccgtcaaggggcagctcgcaaccagctcagacatgtcgccgaaagatcaagagtcgcgccgaaccaagagagccatcatcagggcttgtgatcaatgccatagacgacgagtcaaggtcaatctgcgtggccaaagatccggtgatcacgacttatacctacgcttcgatcatttcgatagtgcgatggaaacgccgaatgttcccgatgtaggcggactcgtacggactgcacctacttcaatccggtaagacccaaagggcccgcccctcggtaagtccatccaaacacgtctcgttacacccttcaggcaacttaccacacttcctcgtatctaccagaagccatttgaagccaaagacggataagcggagctcgcccaaggatgaagagtctaccacttgcggatctggctccaagcctagtcccatggcgacaccgcgagcgatggcctccacgtcaacacctgcggaaggctcgaatcgcgaccgggtgaatgacaacgaaatggaaatgtggcatcaggatcaatcgccttaccatctttccgagaggacgaacgccgcggccacaaaccggcctgatgctcagcagaaccaggatgagatggtctcccctgcaaacccacttgagagctatatttcgcaagactggctggacgacgcttggctttcccaactattacccacacacaacctaggcaacgatcaaagtcatcccttgaatgcgcagccgacccagaatggcatgaacacatcttttgtccaccctcatggcacagatgccggaggggcgataatgatggatccggcagcctttacgctggatcctcgacaagtcgcttgcgctcccatcatcgactcgagatgggacgccgcacagatgttggacccgggcccttccaacgcgagcgataggaaggatcaacaaggcaaccctggtgctatttcctcggacccactatatcaacagaggtctttcgagccgttcgcgtcctcggtggatctttctctcatgcgaagtcaacgagatcctcagccagccacttttgggccatctcccatcgtaaggcttgcgatcgacagccttatcttaccgcagatcgccttgttcttcaagcgaatccacccaatgatcccggttttctctccttcctacgtctacgaaaagattgccatccagactcatcacaccgactcggacttttgcgccatgctgctagctctgacgagtctcactctcatccaccccctggctccggaagaacgagccggaaaggacggtcgtcgagaacacgccaagatgttgctcgccgaagcctgtcgattgagagacggctgggactttggaacgagatctcagttctccgctgcaatgacgagttacttcatgttcggggctctgttcgaactgggacaagccgaggcggctaggatgaggctgagggaagccttgtcattaggagagatcatgaaattgcaccggaaagagggatacgacctgaacgacccgcttgaagcgcaaaggagactcaagctcttttgggtcttgacggtcacggaaaggcatgtcaaatgtactgtaaccgagtctggtccgcccgacatgagactgatcgaacaccatctttccactctcagggcctatgctatgcaacgaggcggtagtatcgtattcacgggtcagatatacgattcgattgagatcatccaccccgaagtgactggactgctgcaatcgacgggatcggcacctccacgtcgagaagcacttcaacacctggctcggatctttacctttatcgacggggatgtcgttctttgtctcaatacacagtgtggcgccgagtgtcaacgaatgacgccgcggaaaatccggcaaatattgtcaggcttgtcaggagacgctcagcaggtctttgggatgaccgagaccgagatgacagactcgctcaccgaaagccaaaaggtcgatctcttcatcacttggcaatggttgaggaaccgaatatggcgcctggctttcacgcacggtctgatcgatacttcagtcgaccgacaagatcaactctcggtcgcactaccttttcaaattgctcagatggcatgcatgtggtgcgagactttctcacgggacgcaatggaccagcacggacggggctttacggaaaagatatgcgacatcgctagtctactaccgcggctgttgtcgcctgccacggtcgatatcatccgtcgaggcatgggaggggatgtgccagatatcctacggatgattcgtagactctgctttgtcgtgcgcaaccattgtcgttccgatctggcgactgtagactcgatcctcgccgagctagccgccgcgagccagacattgatggcatgattaccagcgtttcttagtcctttcttccgctgagtcaccccgataacttcaggttactgtagcccgatatggctctcgacctctgtgcgaccgagtctggaagagagtccgcatcccatcgactcaaaagtgagtatgctcccgacggccggggcttcggggacacgtcgcgtggcctggtacagcttagcatcgatttgcagccgtcagtctcacggcagctgacggcggcaagtcagcagacctcgcttcaccgctcgccccttctcaagtcgggccgtctccttaaagaggggcccattcaatagtccgaccaacaatactgatctgcgagccaacccgagccataccttggtaaagccgattcccagatcgacctcgggacttcgtcgaataacacctgctccgagatatgctcgagcgatcgtacatataagaccagttgtggtatggcaagtgatcgttcatggatatggcgaacataatagaaggacaaggacaagctcgaacctagcgcaccgactttgaccaatcatggacaatacaatcgtcaacactatcgatggcaaggagctcgccgctatggggttcggcaagaccgaggaggagttcagacaactcctcctcgatgccaaggaggccgacgaagaagaccggcgcctcactatccgacaggcgttgcgcaaatttcgtcctgcagttgtctgggccatggtccttagtctaaccttgatcatggaggtgagccagattcgttgtgaagcttgagcttgaggccggctggcttaccgaggctctttcccgcgcggccctcagggttacgatgtagtcatggtcagtatcacgtgatctccgtggcttgacgagggttgaatgtcgctaatatacgttgccgcttagatcggatcgttctatggtcaagagcaattcatcgaacggtttggtaccgtcgagggcggtgtcaaacagatcactgcagcttggcaaagtggtctctctaactcttccgtcatcggtcaggttggtgacaaatcgcgtgcgccgttgtggcgcgttcgactgaccgtatcaagaatttccacagctcgtcggtctctccatcggtgggttctgtatggacacctatggacgaaagaagactctcttggcggctcttgttgtgatgaccgccgccatcttcatcccgttcttcgccgtcaacctgcccatgctcgccgcaggcgaattcctgtgtggaatgccctggggcgtgtttcagaccctttccacgacctacgccgtcgaggttgtgcccaccgttctcaggccaatcgtcaccagcttcgtctgcatgtgctggggttggggtatctttatctcctccggtgtcgctcgaggtgccctagagattcaaagcgacctggcttggcgactgccctttggattacaatggatctggcccgtacctcttttcctcgtctttctgtgggcgcccgaatctccttggtatttggtacgaactgggcagattgaccaagcccgagtgagcatccagcgactccgacgcaagggtgatgagcacgacaccgagcacgacatcaaccggaccttggccaccttggtccacaccattactctcgagaaccgcgaaacttccggtgccacctactttgagtgcttccggggcatcaaccgtcgtcgaactgagatcgtgagttctgaattgattattagccttcaccttcttgacaacttatctgtcgatctttctccgtagaacatggttgtttgggccgctcagatcctatgcggaaacgccatcatcgggtttgctgttgttttgtaagtatgagcttgacggcacctgcaaagtttagtctacttatccccttctcttacagcttccaacgtgccggtctcaatgagaccaacgccttcaacctgaacatggtgtgtacacccgtcatctatcgctctgaaaagggtaaccgctgatcttcgacttgacacaattcaggtcatgaactcgatgtacatctttggttgtgagtagctggcattgagtcaattcccccttggtcgaagctaatgttgctagcgataggcttgctatgctggttcctcatgacacggttcggccgcgcgactttgtatatgggcggcatggctgggatgttggtatgcctcttggtcaccggaggactcggcttcaaggactcgcccggtacctcctgggctatcgggtcgttgctcatcttccaaacgctcatcaacatgactaccatcggtcccgtgagtagcggcccaatagcgccagtttgttacccgtctgatctgtcattccacttcgtcctgccaggtctgctacaccattgtcgccgagacttgttccagtcggctccgcgcgaagaccatcgtcctcggtcgtatcgtctacaacctcaccggaatcttcagcaactcggtcactccccgtatgctctcccccacccaatgggactggggcgcgaagtctgccttcttctatgccggtaccaatttgctgtgtctgatttggtggtaggtcactccacccagctatctcaacccacgtatcgaagcttactctgacgactttgcagttggtaccgactccccgagaccgctggacgaagctttgcggatctcgagtccttgttccaacaaggtatctctgctcgaaagttcaagcacaccaaagtcgaccgtgagtacaatcagaatcgctacatccgcatccttgacgtctaacaactcgttggtttcgaacagagtaccaccaggccgaaactttcccctccacgcctatggacgagaagaagcaggcttcggaccacgtcgaattcgcctaggggacgcatattccggcatgtcgggtttccgcatcagagtataccgctatgcgataccatcaaagcgtttgaaagggacaagctgttccagtaaataagtatttgccaagttgtgtttgtatggaaaacggagaatcatcaagtttggcgaaaggacgggaaatgacatgcacagggatttcgtgacagcgcagtttcgcctcagacagatatagcttagaggctggcaggcttgatcaagatttcttagtaaccctgaacgaatctgaccacaagttgagcgaatactactgctttcatgttcactcctatcgtcgcgccaagactgggggcttagtggagtagattctgtatcaacaaagatggtctcggaaagcgcgaatcctcatcattagtgcatcaagtcgaatggctcatcatcctttgatcactccatggaatggcttgatcaacaaacgagaattgagaagatgatcgactcgatcgattgaagatgtgatctttcaggattattctagctcgatcgtcaaagaggtcgcaaccgacttttagcttaaagagttgacctgtgatccgcgatatcctcgagactgagttcgctccaaaaccgcaccaccgaatcagtcaaggttctaccgtttcacgttctaccatgccaaccaaagctacggctaaagtgacagaaaaggcggtgaagggtgacgaaggtcggtctcgtttttccagtcacctttcaccggtcattgacagtacctccttgacggaaccgcaattccatcccttttccagccgaagaggtgagcatacgatcgagttcgctctgttcgttcgattatgtctaatgtcatccctatctcaggtggtactcaagtatctcaagcaagtaagccgatcgggctcgttcttccgtgttgtgtcggcagatttaacaacttgatcggtgccaaaaggtcaatcgcccctatgccgcaagtaagttcggcgagcgttcgtgatcgtcgggctacaggttcaccttcccgctcagccgatatctcggcgaatctgaagaataaggttaccaagacgaatgcgcaaaaggttctagggactctggctggtgattatcactgtggggtgtgtcttgcctacccagactgactgacaggccgcaacgtcctttagacaaaggactactcagtgtcaagacgtacgggaaacagtcaatatacgttttcaaccaggtccgtgcatgattgcagtccagaatttgatggaaatattgatagactcagattatttgcctgcaggccaacctcgagacactgccagttgaagaattagcggacattgacaacgacatcaaggccgttgctgacgatctcgatgctgtcaagaagaagctgaagaacgtaggaaacggtaagggtcagggctcacgagaggcatctacagtcatgctgatacactaccttgggactctcgctgtcgcagcggtagctagtatgatcgcccagccgaagaccgaagacattcccgccacactgaaacgtaccgaaaccgaggtgagtggaaccttgtgccgcgagatgtgaaaagctgatctgacttgtaaaaccgggatccagaatgatgctatgctagcggctctcgcacccctccggaaggcagccacaggaggcggcgccgaacacgacaacgatgggcaagcgggaccgatgagtaaggcggaaatcgagtcgatcgagaaggagtggcagaagtggcgcaaggagtgggtcaatcgacgcaagaactacctagcgtaagcaaaaatttgcaagacttgttctgaccggtttctgagtactgttccggtttccttttgtaagccttctggacggtgttcagacggacgccacgcctacagagcgtctagagtttcaagaagagagcgggatcgacacggagactcccgagatgctcgagctggaagccagcgatctctgcaagcctgctgctgcgaagaagctcatgctagctagcggagcattcggaatcaagaccgcgagtatcagccctaaggcgatcgttgctagtcccggtgacaagaggaagaggtcgtgatgaaaccggcaaagcccagagatcccggtcggattcccagtagtagtgccgctttcaacagccacgcgaaaaccacgtcgataacgtacgtgacgtcttcgccgggaatcttcgatgtccaggtttcccggtgacccttttgccattcgcaagcttccgtcaggccatctctgtctttgagaagtagatttcgtcatagcatccaacccagaggcttcgttgtaatcgagtctgtctgtctgtcgtttttgccatcgcaatgtctcctggaaccctactatttgacaaaacataacccctgctttctgcaggttgaacctagctaagtcgtagccccaacctacgaccatgacactgtttcccctgggcaacaaggctcgacgtccaagctcgacacatccttacctgtcaggaaactttgcaccggtactagaggaatatatcagctatccttgcgacatcgtcgaaggatccgtacccgatgaactgcacggtggtcagtatgtaagaaacggaggaaacccggtcaaccccccagatgaggggcgaaattaccactggtgagcatccgatgtcccctcgcattcgcaattcccagaccgatcctcgctgtgtacgtaggttcgatggcgacggcatgcttcacggcgtgtttttccccagaccgacaaaggcaggagaaccacccacgcctccgctttacacgaaccgccacgtttcgacgccaatcctctcactctccttaatgctcctccgggcacctctgccatcgatatccctcctgatatcccctttgacgagccttcatcggatcctgggagctattgtcacgacgtttctgttggcattcgaagcaggagttggcacactgagcgtggtcaataccaatgtcatctggtggggatcgggactgggaagtgaagccgaggaagagagagtatcgggtggcaagataagcgaagatagattcacggagaagactggtcggttattaggtctctgcgagtctggaccgccaatggaaatccgagtcccggaattggagacggtcgactgggatcgaatagacgatggacagggccagagtctcagggagaattacggaaagtgggatccacgcggatggaagctggccaggctacaggaggtgtgtttacagcgatatgcggcttcaaagggcggatggtgctgaacggatctttgacaggattggatgaccgctcaccctagggttgatcccgtaaacggagacctcgtgttttaccaatgcgccatgttcgaaaagccgtatttgcggtactcggtcgtcgatcggcatgggaaacatcggacatggaagatgggaatcgacatcggaaaagccaagatgtaaggagcacttgaaccgtaattgctcaaacttaaatcctgacctcagcatgcttcccgatcataggatgcacgattttgcttgctctcgcaatttcacaattttcctcaacttgccgctcacactgtccccctttaacatgctctcctggccacctcgacctatgattcatttcgaccgcaacttgccgtccgagttcatcgtcatgccaagaagaacagactcctcgaccaagcccgttcgtttcattgacccagaaccgagcatgatctttcataccgccaactcgtgggatgaccggtgcgagcagtcgggcgacaccgtcatcgacatggtcgcatgtcgcttcaaaagtgccaagctggtatacgccgctggagctgtcgccatccccgcggaagaggtccgagctgggttcgacgacgtcgtccggctgcactactaccggttcttcttcgacaaggacggatcccatcggatatcgcacaacttccccttgagtgagatcccattcgagtttcccgcgacacacccagggaaatcgatgagcaaggctcggtatgtctatgggtgcagcatgcgggaaggaggtttcgacgaacgactcggcggagcggccaaagtcgacgtcctggtcaaattcgatgtgatcgccttgagcgaaaggggaaggcttcgcggcgaaggcaaggcgaaagcggtcgatcagaggacggtccttcagatttcggaagaccactcgaacgggatccacgaaggcatccaggtgttcatcatgccacctggatggtttgctcaggaaagccgtttcgttccgaggaacattcagggcgcagacgaggatgatggttggcttctgacatacggtgcgtcacaggatggcattcgggtaagtttacaaaagaaagctgactttatggttgcaaaagtatacgacgaacaacacgtcgatacacacggccgagcttcaaacgctcctggttctggatcggaattgtggatcatcgacgcaaagacaatgtggaaaggtccatcgagcgttgtctgcaaactcaagttgccacagcgtgtgccttacgggtgagtcaatcgcactgatcgcttcaaagaccggcaagctgaatcttcctggtccggtgaatagattgcacgggacttggatacctcccgctcatcttgacatgcagagggagctggaacacccaatcatgtcgcaaccgtcattggttcacaagatcatggcttcccgctttcgacactttatcgacatattcaccacgagacctgcatcgcgctcaaagactctggctgagcgcttggcattctggatccttttctccttgtcttgggttgttctggcacgagcagcctatgatatacggaacgactatgagagtcgttacggagctatcacttggctatccgcgggtcggtcgattctgacgcgtattttgggagccatctcgaatgctcaggtcagtctcgaatgtaccacatgagcgagagttcggctcggtctcacggcttcacactatgctatcatagatgctgggaggactaggtgtcgggggcctgttgctgatagctttgagcgggtcaaggtcttgacaccgcggtgccgtctcgtctcggtccgggcacccggcacttcgggcatcgggcacgactccaacgcggaagagacggtcacttccgtcactcgatgaccaccatcgtcgaacactttcctatatagcctatataccactactgtattctgtcattgtcatatacctttagaccctagatgcgtcttttccttgtttcatcttccacacttatacactctgcttcctaaaaacgttcatacccgcgactacctttcgacatgttttccggcgcgcaagtatccctctaccccatgacatccaactttgtcccggtcatcctcgatgccgttaaagcgctggatccgcatcgagaacagctcaaaattgagacggacgacctctcgacgctcctcgtcggacctcctgagattctcttcaaggcgatgcatgacctcttcgtcacggccgctcggtcgggagaacacgtcgtactacacggaaccgtctcccgtggatgccccggtgaacccgacgcggagatatgccgaccctctgtccttctcggggaacgcaaacctactgcggaacggatctcgtctgctcaatccgtcatcgacagcacagccgagtcggcccagcacgtatcggctcagttcagctactaccccttgggggagaacaaggagtacatgaccgagatctacgccgccatcgatttcatcaagggtagcggtgtattctgcagatcgaaaaacttttgcaccaagctcgaaggggacgctgccaaggtgtttggtacgctcggacaggtctttttgaactttgcaccggagcaggcgcatgtcactctggatatcactgtctcagccaacagcccgtcgacaaagaagcactaggaggtgcccgccgcagcgtcaaatggacaacgagcgagtgaggggtaaaaaggcgcttgaggcgtcatacgatagacgaggaggtgaatggcaagacgagttaccttacatcaaggcggttgtaatgaattccaataggctatcacgaagcaattaaatcagacagcctatcactcggcctgtatgatctacctgcaatattttagcacaccgatccgccacgtcccgccttaaagttcacgttcgagttatcgtgacagcgaatgaccagattctgggctccgtggcgctcgagcggaaagtctatcattcgatcggcatttacaagacatgaaaccctcagaccagctagtttgcagctgacgcctacgcttacagccactcgacgctggaagagacggatggcttgcaccagattagctagccgttcgaaactgttcctgaccgctcaggccatggtactcacgttccgggaggcttgctggtaacgtcatagacgactcggttgacaccgttgacctcgttggtgatcctggatgatatccgacgcataacctcgggagggaagacgaacctgcgatcgtgacaaaacaatatcaggaatcggatctcggagatggacgacgcgtgaagctcaccaatcggcagtcataaagtcctcagtctggacagctcggagggcaacgacctggtcgtacgtcctcttgtcaccctgaacaccgacggcctggataggcaagagggcgacaaaggcctgcgagatgttgtcgtagagaccggcctttcggatctcctcaatgtagatgacgtcggcagcctggaggatggcgacctgttcccgggtaacttctccgagaattcggatggcgagaccgggaccggggaagggatgacgaccgaccaagtgggcggggatgtcaagcaatcgaccgagggctcggacttcatctgtgaagatgaacaccgacgcgggtagaccatcagcagcgttcactccgactctccgtgtgagccgaaactcacccttgaacaactccctcaaaggctcgatgagcttgagcttcatgttggccaacaacccaccgacgttatggtgagtcttgatggtcgcgctaggacccttgaagctgatgctctcgatgacgtccgggtagagggttccctgcaacaaccattcgatctttcccttggcctctcctcccttctcttgcaattccctttcggccgcttcctcgatcttggcagcctcggcctcgaagacctcgataaaggtgtttccgatgatctttcgcttttgctccgggtcaaggactcccttgagacgtccgaggaagagatcggaagcgtcgatgacggtgaggttgactccgaggtcctctgagagcatcttgtgaacctgagcgccttcgttttgacgcaagacaccgttgtcgaccatgatggcgtggaatctgtcggaccgcagcgaaagcgcgagattgcgacgatcagtacgatgttcgtacatgtccagcgtatctctggcacgacctaccgatcgccgatagcctcgtgcatcaacttggcagcgacggtcgaatcgacaccaccgctgaccgcaccgatgacctgtcccttttcaccgcaaatctccctgatcctggcaatctccctggggatgaacgagtccatgctccagcctcccttgattccgcagacgttcttgacaaacgacccgaggacctccttgccccgggtagagtgagagacttcggggtggaattgcactccaaagatgggtttcgacttgtgcgcgatggcggtccagggcgaggtaggggtgtgtgcgatctggataaagtcctcggggagggattggagctgatctccgtgagacatccaaacctggattcatcgatgagatcgggacgagacctggatcagcgtttcatccctcgatgcaccttgtcgccctctcgagtcgatgtgtactcacctgcataccgccctcgtcctcgcactcgagtccctcgaacaatcggtcggccatctcgttcccagtcttcttgaccgtgaccctggcgaatccgtattctcggtgagtgtgagcaccgacctcagctccgttcaactgggcaatctcctgtaaagatggaggacgaagcgggagtacccgtatgcttgtcgtcagagccatgtctcacgctccgtggaaggctcacagaagaacgcacttggagaccgtaacagatcccgaagacgggcacgccgaaatcaaagatggccgggtcgacacgaggggcatcctcgtcgtataccgagtagggagatccggaaaggatgatacctgcgacaattcggtggatgagcctttctgcagacgatatacgcatgatgtgcttgtctcgggttgaatcactcacccttgggcttccatccgaggtccttcatcttggtggtgcagggctgcatctcacagtagacctgaggtgtaaggatgcgggcaaagcgatttatgatccgtcagtctcgtatctaggccgcggtgaatggagatccgctcactccgagttcacgacatcgtcgagtgatcaagtgagagtactgcgggaaagaacgatgtactttctgtcagcattgcgttttcaaagtagctataggaaaaaaagtgtagacgagactcacttgcgaaccaaagtcgaggatgaggaccgagtcgtacaagtcgtggatctgctgagtagaggccatctttgctgtatcgttctcctatgggtatcacaagaaggtatagaatgcttcttggctatgtcacgatgtcgtcagttgagccgaatcgtaggtcagtagccgtctggactcttttgaaagtaaaagtcggggagcacgtcccggcaggctctctctctcgtcttgcccgagtcaagaagcggaagcaaaaaatcggtcaacaattagcttccgccagcgttttcaatcacgtgatcgtgtcgtgacttgtcgatttgcttccgaaaccgctcgacaaggcaaccctttgactttccatcgataggatgtagtgtatgtaagtgtaatggtgtacaattggacattctctaaccatctacaccaaccctataccctagagtttaggtgaacagaacaacaacgcggccataatcaaaatgtcatgttcaaacatcccggaagaagcgaccgcgaatcaggcagaggagcaaaccctgatgcctcgtaagtctaggcacctcggccgcctcgtcctccaccagcccagactcgacaataatgttgaccattctcattcactcttgcacctgcaggtaagaggagggccaaggatatatgcgtcaaatgtaggaccgaaagaggtcagatcgtcagactgagcatcacctattgcaagtgagtgaactctgtcagtcgctcgcctcgcatgccctcgattcgagtgtctgacaaaccatggcccgggcgtaccataggaaatgcttctacaacgcgacctaccttcgtcttgccaagaacatcaaccttgcgatcaactccaactccaatccatccgccagtcgctcatccaacctccccaagactcctacccccggtcgacctcccatgcaaaagggcgacctcctcctcgctctatctgccggagcggggagtctggccatgctcgatctcttgatccagaatcgattcgtaggcgatccagagagtaaagagaccatgcccggagccgaggggaccaagttcatcaagcggttcacgtggaggcattgttgggtcgtgcatgtcgatttcagcgacgtgttggacagggcgagtcgacgcgattcgggtggacgtcatgtgccacatcgtgttccttgacagctgatagtcgtcctgtctgctactcatgccgagcaggtacacgatcggacgcagatgttgaaggagcagatcgaagcgtatggttcgccgtacattacctttgtccccctcaagatccaggacgtttatgacgaccggataccgggacgtctggccgagatgcgacgggaagacacatggtccacagccggattgggcgttcgggctgcgaaaatcggccacgcggggttgagggtggatctcggccgagcaggtacctggtcctagatttatatttggtatgctgttcgacgcttaccttgcctcgccttgtccacgccggtcacagatatccccatcgtcgaaaataccggtcctgcttcggcatccggatccacatcgacgacacctctcgagaccctaatggcactaatgtccaccttgccatcctcgtctcatcctcatctacaccaaactctgcttcaaaccctccttcagacgacagcctacaacttgcctaacatctctcaccttctactcggcgatacttccacacgacaagccgtctcgatcataagcggcacctcggtcggacgtggatggaacctcggatcggagcttgcgctctccgggtatctccctgacccgagttccacctcggcagccgaggcgggatcgatcatgcggatcaaaccgatgagagatattatggtcaaggaggctgcttaccattgtcatacgaggggaatcgagacgtataattaccgcggatgggacacgtacgagggggctgcgggggcggctcgaaaggtcgcaggcgaggctagaggcaagggtggcgtgaggagtttggagaaattgaccgagggtgagcatcatcatgaagcccatcggggatcgaagtacgcggggcaagggcatacaccgagctgacgctgggtactgtcccggcagactttgtcttcaaccttgatgtcgatcatccttcgaccgtatcaacaatcacgaggactggttccaagttggtcttcaagggttacaacggactcgaaatggacagcaagaagaaaaaggaatggggaatctgccccttttgcggatggtgagttgaggcgcgcctgacaaatgggaaacctaagcctagaactcacgcgtgtctgtaacgacctcagtccggaggaacccagcgctctggaatggaaggcacgtactgcgctgacttctctaggccaggcaaacaaggctctggtcgcatccgccgaaggaccatcgaaacaggccgagaaagcagacgaagcggtcaagcggaccatgcatcaaggtcatgaggaaacaaccataaactccgatgaacggaccgaagtgaccagcttggcagagcaaatgtgttatgcttgcctgacggcattctcgaatgggacatctgggttgaggaaaaagggggatgacccggatggagagcgattcgaggtggagctaccctattgggtcactcgacgtgtacagggggaagtctcgggcgaggtgatggcaactggagagatgaagcgagacgatatgaaggctgtcgtaggcgagttcttgttggacgaggacgaagatgaggacgaatgatgatgatagcacgatagataatacaagaacatagacctgtcggttcgcgacgagtctcatgtctgaccatgcatgttaagaattatgacgtttgctgcctagatgttgaaatcagactctcaggtcgttgctcttcttaggccaaagctcaataacaaatcttcaaagctctgcgctcttcacctcactatcgaacacgctatagacgtcgtagcgatgtcgtcgaacacctcaacacaaagatctcaattccggccgtgtatcgatcttcatggcggacttgtcaagcagattgtggggggtaccctcggcacagacgactcaaaactcaagaccaatttcgtcgcaacgtaagacatcctgctgggtgatgctgttgaatcgctctttgatgaatcactcgcacggaattcgccctacagaaagccgcccaaacactttgccgagctctatagacagcacaacttgaccggagggcatgtaatcaagcttgggcccggaaatgacgaagcagcaaaggaagccctagctgcatggccaagtgagctccaacgtctctgcattcatctgagatcattcaactgattattctgccagacggtctgcaggtcggagggggaatcaccgagaagaacgcggaggagtggctgcaggcaggcgcagagaaggtcagtttatgccctcggtgttgtctgggctcccactgtctgacgagatggactaccgcaacaggtcatcgtcacttcctacctgtttccatccgcaaagttctctttggaacgacttcaagctctggaacagcagatcggaaaggacaagctcgtggtcgacgtgaggtgattcgccatgacatgcccgtccgacattgtccatacttacagcatagctccaatatagctgtcggcggcgaggtgacaagtggatcgtggctatgaataagtggcaagacttgaccgatatggaggtcaacaaaggtgcagtacatgtttggcaatctgtcgtggtgcaaatcgttgaatctcctgctcttgtccatcacagaaagccttgagctcttgtcgcaatactgcagtgaactgctgatccacgctgccgatgtggagggcctttgtcaaggaattgacgaagagcttgtgacaagtgagccgccgtttcaaatcatatttgattcacgtcagactcaatgtcgccttcgacacagggctcggagaatgggctaccatcccatgcacctacgcagggggcgccaagggtagatcgacgatacacagtgccctgtttgccacgagctaaccttgatgtaacttgacgcttgccttgctcagccatctcagacctcgagctggtcgaccgattgtcaggaggcaaagtcggcctgacctacggaaggtaagtccttccgggtaagaaagctcagttttctcttgctgaaggaccgattgacatcagtgctctcgacttgttcggaggatctgctgtcaaattcgatgaacttgtgcagctcaacgacgagctccgttcttaagctcgatcaaaatggtccataaggggcaagtaaaggatgtcacgtaaagtttacgcacaggtctccgacgatgggcgcatcggaacgaaatctatacaactgggtctgccttgacgcggctttatattctacttgacacaaggcaccggacgttgggatctcataccgccagccatctatcgctgacgttttttgccaggagtggcgagcccgtcaaaagaaagatcgacatcaaattgtatgcagcttcgcctgctattgacttttctcgtaccgcctgcgcatagagacgccttgttagaagccttcattggaggcgaccataccatcacgtacctgagaatcaacggcttcctccatactcttttcaatctcgctcagtgcttggcggtaatgctttactgcgaggtttaatacacctggagaatttgatctgagcagtcagatcccaaggagcaaatacaggcagtcttacctaaaccgtggaaagctcgaccaaagttgtactcgacttctgcgagcatttcgcgccctccttcattcttccgcaaacttcggtaccgattcaggaaggttgcgccgagcgtagtcatgtgcatcctgttatcacactgcctttgcaaactccgtgccaagtatgcatgagctagggacaggcagaggagggaatcgtaagggtttatgcggtaggctcgcaaatagtacgctgggatgcagattgaagtcagccttcttccaacaaccactctgctcgtaaatcattctcgtccctaccgatagctccttgccaacttctagccgaagcaagacactgtccatagatgaattcgagagctattcctctcttcttgggaatcacgggcttgtccggccgatagcctggaaaaaggatagctcgcaaggcttgcttcgtcattacggtttcctccaattcctcttcatggtccgagtcttccgagacttctgcgtcgggctccgcctcaaagtctgtcttcttccgatggtctcggctcgaggccaccagtcggtcgccccgaatcttggcgactggcttgataccttgtttttgcttctccgtctgtggcagaacccaccgacctaaaggatcgtgccagaacatagccgccccctcagcagcgctattccagagtcgcaactggcgtagcatgtatttctgccagatcgtgttagcgaatcgatccgctgcctgtgatcccgtacccaacgccgctatgagctgccagggttccacgcggtactgataatattgcgtaaagaagcggacttcgtcgagtaccgtgctcaggtcaccgatacgcattgcgcccgctgtttatttgacgatcaataaccatcagtgatggtgaatgaataggacaagcgaggcaaccaatggtaccagatactaacacataaccgccagatgcaatctaatcttgaacttctctggctggaaaatcactgattgggacatgtgctgacatatttgaattacttcgatctccctgtgatcgcgcagaagaagggtcgaaagctatgcttcccatcccgtgagaaaagattctttgtgaaggggacgtcactggcttactttcgtggacacatctagccattcgtcagccgataaccccaggaagcgagttctgactctctgcaccagctgatcatcaagctgagcggcaggtacagtctcctcggcctcatctaaagacgagggtaggatcagccacaagatcggcctgaccgcagctacctagatgatgtaccattaatcttgtcttccagccgttgctcgtcagctcctgtcgctccgtgataatctgataggtctaatctcttgacccgagaccgaacgtggaacttcacgccctgacattgcggtgaaacctttcgttaacacctgtgtatccgattctcgaattatggtcactcacccgctctctcggaaacaggacgcgagcttgacggaattcggtcaccatttgcctagcgtccgaaacatacgtctgtgtggcgactggatcgccggcaaaggcgcgttgttcgacttggctcatgcgttcaatcagcgtttgggtgtagatttccagctgcgcgttcgcttccaccttgtctagccgtgctcttgtcctgagctgattataagatatttgagtgggattgaagaatccgccttcgtctgcagtgggctggttgtccatcgcaattttttcggggtcgttcttttggttcttgcgcactgaagattgatatattagatgaccttgttcgacggtaatgagagcgattctcaccttctttgatcagtgctaaagctcgcttcaagtccccgggcccgccgcgatcctctaggacagatgcaagtttcgacctggtctcatcgtcctcgggattgtccgagagtactacgagtcgcatgatgatgagttctggcgttctacggcagtaaagatcatttcaagacatgccttcagtaaagatctcaactgcctgatcatactgcagtagacgttgattgcagattccaaggttgatcaagcactccgtcaggctaccctttgcttcctggtgtgcttgcatagccgcttggtccgtctgatcgaccggcggctaacgtttggacgcagtaactgttaaaagtgttactcattacttgtccggttcgcgactcgcctcggaggaaggtaacgcctcgtatgcagcttgcagcatattgagtgcttccaggtaacgcccgcggtccatgagcgcttttcctacatcgacccaaaatggtggaaaggcttctaccttggtttcgcaaaccattcggacgtgaatctatcgtagattgtccaagcatcaactctgaagtctacaccttctcggccgatttgactcacatcggcgtcctcgtcatgacccaatttcaaacggattacggctaatctagatcgcatgcccagctccaggtcgtagccttcacgatcttcagttactgagttctcttctgctcgttcagcgttgggaggatcgtattcgctgtcattgtccaacttgtcccagaacacttgcttcgaacgaccttgtagccatcgttcgcctcgcttcagcactgtcgcagcaagctcgtaatcccgagcgaggatcaacaggtcgaccaggagctgcacatattcccggtccatctcgttcaatacagtttctcggtgatcgtccgttggcgcctcgaaagtcttgatatggaattcaaaggctttgatgaggtagtccacaccttcccaaatgtcaacctcgactgaaccagacccgtagatatagacgcattgcttgagagcgccgatatcgtatgggttaattgcgaaaagccgtcggaaacatttcagcgcctgcggggggtgaattatcggctgtcgatgagctctcgctcaggtctaccgcaaattagtatgctaaccgtcttatcatctcgcatctcggtgaaatatatccccgaaggcagcaggacttcaggattataaccgtccgtcgataaagctcgtttctgggcgtattttgccacttcatatcggcccagctcgctgccgattgaaagcatcaacacaggctatttgcataagttgcgtaattcgcgaatactcactgagcatgctctctgacttcgttccaggtcatgccatccttgctcagctgtgcgtgcatcaatctgcatccaatgctcttgtcaagatcgcctcgactctcgtgcactccagccaagcaagaccaagcctgcggaatttctgcgtctatcctgatcatctccgaggcgtactgaaatgcggcttccatgtctccgttgatgtacgacattgccgagttgttcgagagctcctgcaattctggcgagagcttcttgaagcgggttccctgtcacagaggcgattcggcgtggtgggtcaacaatcaggtacgacgaagcggtcgctttgttctcactcttttgccgctcttctttcgcctcttgaaacctcttgccgccctcagatcgtccttgatcgattgaagcggatccaggagtgcctggtctcgagcggtaactgtccgtcccggttgcctacctcccgcttcctgggcgatgtcatcaactacatcactgcaagttcggccaagtgcatgatcagcaccttttatggacaatccatagggcattcgcgctctcactcgaagatgttggaccgaccggcctcgttcgagtcttcctgatcttctccgatccccaaatcttcgtccaggtctgactctccggattgagtgtccggacttgaagaccgttcccgtcgccctttcgcactgttgctccgtttggttcccggtttcgatctccctttccccttgacgtcccgggagggcccgggtcggctcgtagacttcttgacaggttctccaaaagcggagatatccgaatccgactgttcatcgtcccgcagacgttgttcgaatcctgttacaacgtcctgtcaggagcagtctctcagattatgttttattggtacttactctcatttgacgcttcagaatcatagctcgagtcactctgctctccttcaaaagcggcttcgagctcttcctcctcgtactcagattctgggtctgagggcaatccgttgtcgaggggctctgggctcgagccgggttcgttcatcgccatttcttcgtcgacctccatgatgagagtgatgactgttcatgagccgatgacagcgaagtatagatatagagcgcagggcaacagctgtttgagtaaagagaatcgggtgtagggagatctgaatagctctgaccttccgaagccagagctgaccgcaggcgacgggcagcaaaaagtaaacaagcgagttgtgcggctacgacatcaagggaaatgtacaccgtggtcacggttcggtcaagatcgactatcccatctacatgccattttacatcgcacaccgatgccttcgaacgagacccagatacgcagcaagttacagatacaaacaaccaaggtcgagccggcaggcctttttggtggaaacgatcgcgatcgatgacctaatcgaaagtaatctttttggctttgggcgcatcggaaatgtcctatagggaagacaatgttagttttcctgacacattccacgaaagagaatattccgagcttaccctgtagaaagcaccgtacgagccgtgttctaccgccatgtcgagaaagaaagtcgccgagtcagctcaatcctcatccgcgttcacctctttgatccgactgaaacttacccttcttcttgatggtcgaagggaacctgttcataccctctgggatttcggctccggcatccctcaaaaccctcatgaactctccggccaaggacctctcgtgagcctccccagtgaagaaggtgatggcctttccttcctttcctgctcgtccagttcgtccacatcggtggacaaaatcctctgcaagcgcaaatccggctcaggtatcagctcgcaagctctactttttacgtgccgagctcgatatttaccggtagtcaaggggaaggtgacgttgatgaccagctggacgtcggggatatccaacccacgcgcggcaacatcggtggcgaccaagacgttgaccttgccctccttgaaagcgtccaacgctttgaacctagcgtcctgagacagatctccgtgcagtccagcgaccttgtatccggcgttcctgatcgtgtattcgagcctggtagcttccttcttgtacagcgcaaacacgaggatacgggcgggcaagggtgagtctttagggtggttcttcatgaacgttcggaggtggtgcaacagcctaggatccttttcacgcgaagtgtccataacctcgacatctagcacagcaacgacacgggaaggaaagtggagacttttttgtcagtgcgactgcccacccagcgagagaagtcgatcaagactcactctgctgaatcctcttgttggcgctcaattcgtcactaccgacggtgatcttgacgggctcggtcaagaaagtgctggctagcctcctcaccgactccggccacgtcgccgagactgtaacggtgcgtgaacgaaaggagcaggcggcatcagtatggccattttcagcggctcgaccgataaggtactcacacatgacagtctgtcgtccagcctccttcttgggacagaacccgatgatctttcggatatcgttctcgaaaccttggtcaagcattcgatcggcttcgtccaaaacgaggtattgcacgctatatttgacccgggatgtaaaagtgacatatgagagattgtttagccgacagtatctagcggaaaacacacatgaactcatcaccaacccggagaaatcgacgtcgccactgtcggccaaatccatgacccttcctggggttccgacgacgatggccgtctccttcttcctcaactctctgatttgctcgtccttgccgactccaccgtacagacagaccgctccgattccgaccaatttccccagagccaataacgtggtgtacgtctgcgtagccaactctcttgtcggggcgacgaccaacaacctgatctttcccgcgtcccttcccttgcccttggcgtcgacgggggaagacgtcgtgctcaacacgttcagtccgggcagaccgaacgagagcgtctttccggagccggtctctgcgattccgacgacgtccttgccctggaacaaggggggccaagaacaagcctggatcggcgtagggtcggtgaacgaggccaggtaaggtcgaagtgcggggttgatgggcaaggtggaaaaggagaggaggatgttgtagatatccggggtaagggtgatgttgtgcttttccaagtaggccttggagtcggccgtcgaagcgagcgcggcggtcaggttggcaggggtgaccgaggaagacgaggttccctgtccgggaacatcattgccgtcgttcgtcccgctcttcttgctcttcttgtccttcttctccttcttagactttttcttctcctcacctgcctggggctcgtctacctgcatagcggaggtgttacctacggcatcggcgacgacgacctcgacggcggcatcatcagtcttctgcttcttcttcttttgcttcttgtcggcgtccgactttgtcaagagcgaaggatccgcggtcgagacgtcctcctcctcggcagcaccagactcttggagtttacgcttcttgtccttcttttccttcttcttgctagcgtcgacggcggtaacctcggcaggtgcaccggcaacgtccttgttctttttcgactttttgtcctttttcgaaatcttggcgacgttcacgtcggggacggtggtatcgttggacatggtgagagtataaggtgtggatgtgtagtttagttcgagatctaccggggcgggtcgtcgagatgtgaaagcccatgatttcaagtcgctatagcactcttcacaaagaggaggctagaggctagaggtctaggaaatcgaaatctcgcctcccgtcaagtcacgtgatttctctcatcagagtaacgttttctcggttctcggcatcaaaatcattccttacacccccggtcgccccggtttcacaaagtaaacagcaacccatgccgatccgatcacaggatcacaggcgagacctgcagccagcagggaattgggtacatgggtacaaaacaggaacagacggcgagtcgcacttacagtcgatctcgaatgcgcatttagtgggctaattctcgcatcatgctcgtagccccatctcacagggatggcgaagctggagctgctgtaccggaccgagatagatgcgaaccttgcacagccattttcgacaaggtagtcgctcctccaactttgacttgtaccatatgcaaggcgcgattcatgcgcgccttgatggcttccccatgatcctggcgtgacacaagtcgagagtgagcgtgttctctttggcatgacgacctgcttttacttttcaagacgtttcgtcgcgatcattactcatgatgttggtccttcgggtcgaagagaaagaaccctagattcgttatttaggcggtcggggtttccgttttttcaaactggcaagcgattaatgatcccttacgcttttgttttgataatcgggaaggcaaccaatgtcaaccaatgaaccgagctgggtcaagtcacctcgcgctggcggtattttgcaagagcagtttccaacggtataagctgttgaaaataatatggttacgagatgcatggggaccacttcccacgagtcatctgtccggctggtggaatgtcaacctttggtcaacggtgataccagccttcaacgataccctagcctccaacgatatcctagcctccgacgataccgcacctcatctccttgcgctctttgacaatacccacctgtaagtactcgataccaccgcctcttcagacacttgctcacttaccatctatcttgttcattcactcggtctctatctatcgtaggcagatcacgaccacgttctttgcgacctgcgacacgctgccgctcagatcgttgtaggtcgtgctctcgccccagatttggccaattgtacgtttgaacagatgcggagcatttcaagtctgaccgagactctcccgccgagtagatttagaaagtctgagtcaagccgtgttgacataggaaccaaagatcaagactggtagacggaacagatgccatgatcttccagttgagatgaacaatcttttgcatcccgtatcggcgttcgacgtcatatagagccacaagcgacattccagtgcggctttggattgtttatactactcgaagaagatcacgctgcccaagtgctctgcaatgacgagcaccggtctccatgttgaatgatgaattcggtgttgatatcgatggttctaggtttcaggggttgaggcgagcgagctgcgacggcaagtctacgctcaatcttacccacgcgcgagatcggaacggatagccaaaagtcgtcgatacggaaaagtccaaggacgatggcgaaagacagtctgacgatcggttaaaagacttccttcatcgcccccaaaacacactcaaaacacagtagaagatcaatacagcaacccggatcactctcaatagatttaccactagaaaaccgccaacgactaacgaaaatcgaccatgttcgcctcccgatcactccgcgtcatctcgcgctcgacctcgtcgatccgctccaccgctacccccagctcgaccccgaccctcgcccgaagatggaacagtagcagcagcgaacaaaaggtggatgaggaaaagatcaacaaggccgctgacaaggtcgattctgctgccgaggaggtgacgaagaaggtgcaggagctggaagctcaggtcaaggaactcaaggtccgtttgggtcttccggagtagccagcgcgatgcctcgatctgaccctcagttcaatgaattcgcaaacatagtccgcactgacctacggaaaagccgactttatcaacctgcaaaagcgaaccgagacggaaaaggttaccgcccgagaatacgccattcaaaagttcgcccaggacctccttcccaccgtcgacattctcacgaccgccttgaaatacgtaccccagcccatcccctcggagaacacggccctgactgctctcttctccggggttcagatgacccgatccgagctcctcaagacgctctccaggcacggggtggtagagttcgaccctaccggcgaaaagtttgacccgaacgttcacgaggccatgttccaggctcctatccccgggaaggaagccggtacggtgtttgagacgcagaagagcgggttcatgttgaaggggaggaccttgaggcctgcccaggtcggagtcgtccaggacctcagctagacggacccccgtgagcgaaagggggagggggggatgagacacggcagatgaatgacgaagaggagacttagatgagagagaaaagagacctgtttaggatcagcgagatcgacctcgcacggatcttccttgtggagccgggaaggtttacaacagactaccacatcgcatcacacgattgttacacactacatacacacacactgcttcgacctctgcgaaaagaacaacccaaacgcaccttgtatcactagattagaccagaacgccacctgatgagcatcatctcgtggcgcgaaacagatggtggtcggacagcgtagtcctatctcccgctcagcttttccagactgcaaggtcgttcgaccagattgcacggctagaggttgcgtgtctggtgaggtatcatgcggctgatggtaatacagtagtaacgttacaagatcgtcatctcatctatgtcgtgcgtctgcgcttctcccgccaacctttggcctctttttgtagggcgaccaggactggtacggccacgggtgcaaagagtggcgtgtagaccgcgtatttgtgctcgtcgggctgtgtgtcgggcaatgttagtgatgccattgagtagacgtagaccaaaaaggcgacgagctcacgaaatataacaaacccatcatcgatggattgaagaaagccttgttggccagatgggcagcttctcgagcggccgtgaacaagtcacgcgaccccgcaggcgaaatgggtaaagcgatggcgagctgatcgaagaaaaaggcggtcagtcggaatcgtgacgagtcgcgagcctagaaactcactttttgcaatgcgttcacggcaccttccacgtcggttctcacttccttgttgatcaccatctccttgatcctagcaaccaaccgggtgatgctgagcaacgtccccttggcgtctaccaggttggaatcggtaatcgaacgcatcaggttgactttctgccatggcgtcaccggtcggattccgcgttcgctgtgatgctcttgtatcttgtatttcggatggactggggggacaccgagtagggcgtaaagttgagaagcgaagtacgcaaaggggagttcgagatccgccatctcgagccgtctcgctgcgggaatcccttgccgaatatctgtatgctccacggccgtgtcctggtgaatgacaacgcctccgatctgagggatcaggaaggcgggcgagccatctaaacgaaaatccgagaataaagttatcacggagaggactttttgtgggaatttacatcgcacaccgtcgtacctgcattttcgagtctgagaggagtatgccttgatgaaggtacgaaaagcaagaagcgcaagacgggatcgttcgagcttcccgagtctgtgatccagctccctcctggtcagttgctacttcgtctgcctgcatctcggcaacccacccaaagtccactgctcgttattcacgaacgtcttcatgtgttccttcgtcacgagccaatcaccagattcttcctgtatcggtgccgactttaggggtgcgtgatagacgatttgcgactcgataccgaaatcgtagagatccctcaggggtgcgagaaagggctcgatcgtggctatgcaacatgacgattgtttagcgcagaggcgcatctccctccagttgatacatgactgacctgcgatggcgccttccacatcccaatcgtatgcgcccgcacccaacgtcgagtcttcgttcaagagcgagaaagccaagttgacccgcctcgaatacttgatggcccgagtaggtctcagagggggtctggcggggacgaggtcggacagagtcctatacagctgaggtgcgaggtactctgcatcgcaaaatggcagttgatcttcagcgatgtccagcttcattggcaatgcagccatgccttacctatcagttgatccgttgtcatttgaatttcaggcaattcgataacgaggtcgccgtcgtaaagcccagtagggggtatataggcctggtttccatttcgtgatggttcgacacggacgtacagagcttcattcacggcaaccacgttcagtaccctaggggttgtagatgcctccttactgatcagcttgactcaccatcatcacgttcggctcccgcctgtgtggtccatgcgaatcgctcgcagtccaaatggttcactctgcaatacgtatcgcaggctccgatagtctcattggcgaacgccttccgctcgttctcttctcggatgacttcgggcgaaacccatagtgtcaccgggatcgaacctcgatctgcctgggaagatctccgcggtcagacacgcagctaacgatcacctccaaccaaatctggtaggctcactcgagaaaagtccataccctccacctgaccggtaggtagcggccggcgttcaatagtggtcgtgtgccaccaaaaggggatgccaactaccaagatggagaggtacgagagtatattccatagtcgggctcgtgatgatgcgttgacacaggcgtctatgcgatgttgttttgaccgcactgatgtcgcggtcacactcgacatgtcgttgcgatctacaaagctcaaatctatgtctggacgagcgctcgacgttcgctgtgaatgacgatatagttgtataattgtcgaccgagcaaagccggtgaagcctctcttgacgagggtcgacgacatgaacccatctcgctagctagctagctcgcgaccagcttgatggatgccgggccatgccgaccgggtgacagaccgacctcacaagaccaggccaactttccatctcgcataaatcgtcacactacaccaccaactatcactcggcctcagattctcttctacagctccatcatcctcgcaacgcatctatctgcacttgcatatcttcacaatggttctcgggcgattggcacactatggattcgacctcttggctgtctcgaccatcgtcgcgggtatcaagaagagcaccggattcgcgtgagtctcgagtcgctgtgcagagcaaggagtctaagacaactctcagggctgaccctatcgataccacgagcagtccccagacctctttgatctcggacgagacggctcgatcggtggccgactcgtacctcggagtgggagagacgatattcgccagtctgagcgggatcgccgtgaacagtcaatactggggacgggatcccaacccgagacgatgagcgccagaggggtgtcttgtcgggagtctggagagtctggagaaagaagttgtccggactagtttgagcgctccaggcacataatccgagggagcggagggtcgagacagggaacgggattcggagccgacgattcagctagtcttcagtagctgtttcacctcgtgagtccctttcgcaatcgatgtaagcatgattcaatgactgactatgccgctttctcgttcaagtcattcaatcccacatcgcgatcccacatcgccaaaaactcgttcaagccatcaaaatcccatatcgctagaaagagaagaaagagatctgtctgaagaaacgcatgcatagtaaaaatacgctccatgggtcacgagcgtcttgtacacatgtcgatacccgatgatcaagaatgagacttcgatcgccagccctaatgtcgtcggtgtccatcatcttatggttgcgcacaaggtgtagtcgactcctcgaaacggggaaagggtctatcaggtagcattgtggaccggctgttacaggagaggttgtctatcccctgtaaattcccctcatcttatcaggcgtatcgaccatcagaccgactgggtgcatattgagattagtagacatgctcattattcattgagacagaaagataacggtaaattaccatataagcgaagcagggagtcgcctcgaaaccactacctggcgactccggcttatccacctcttgcacttacgctgctgtcgttcaaggcaaacccggtcccgtttcgactggtttcaacaagaacgattctgtcttggccccccaagggaaccacttggagcacaagtctgtcatggacgcccaacgtcccgaaaagttcaggaagattgaagggatcggagaggaaaaagagaatgcggagcaacaaaccgacctccaagcaatcgacgcttctccttagattgatccggtactttgtcgtcgcaaagactctcggacacgccaatccaagccgagaacgttgcggcctagcacttcttagcacgtggacgagtgataactcgtcgatatcgttcactcgcgagatcagagatcggtggctcgagtctttccaggtccgttcagacgcaatagtctcggcattgcgggaagctccaagcccgctgctcgaccaccttcgatacatgcttcatcatgatcccgccgactagatcttggcctttacaaactcttccgcttctttgccgctcccgaacccttcgtccctgccctcgatctcctccttggccacgctctcgccctcgacgatggcctcctcttgatcctcgatatctcttttctgcctctcgccatccccgagctgcgaaccagggaggaccggctcgaacttgaaacctcgttccttttcccagccggtcaagctcatcgggtcggcccgacccaagggactcgatccgtgcactttttgcgcgacggggcggagcgattcggccgtagcgatcagggctagacgtcgttcgttcaaaacgtacttgatcctagccatactcttgcggcactgccatcgtagcattgcaccgatgacgggcataaataagcttgccgccaggtctgaacggactttgtagggcgactcactcggaatcctcgtttcgtcaacagctctccgtccaatgccaaacccaacctcctcctctcttccctctgcgtggcgaggacgttgcgctcccgaagaagcacgtaccacaggatgtgtaaatccctgaatgatttttcccgaagttccgctgtcgtccatgatcgacctgcaagacggaatcgaaagccaagatcagactctctcgataagacgacgggtgcatagctccagcacaagacgcacctgatttcaagttgcgatcgttctccatgataggctccaggctccccataccacttccagcctcatcggccgtcttgggcaagttcctcaattcgtccaaagtcagccccatcccgccgagcgggaactttccttcctcggccgtccggaaaaacttccagagcgggtgcaactgggaagttttgtcctcgttcaccgatggcatggtcgtcctcgcaggaggtcgggtagggatgagtttgcccttcggggtatgggtagagagcggggtgggagaatgtcgtacgggcgggagactgtactgtgcggctcgtttgatcgggctggatttgctcgctcggggtgcgacgccgctatcggtagtgaggtcgggagaggttgattcctgttcaggatcaaggaggtgcgagttctctggtggcatggtaagggtctggtggtggttgtgcacgtcgtggggattatgaggagaagtcgatggggtcggatggttggggatttgtcgaccgggggtgtgcatagagcggacccatgcggctcgaggcacggccaccagggtgcggacggatcgattcgacaacgacatggctatgatgagtcgacgagtcgaggaggttcgagtccaggtcatctatcatgatacatgatttattacacaagcttcggtttggaccccctcatctttctctggtgaacgaggtcctcctcgatgctgtgagcggacatccgagtgttttttcaaagagcggatatcacggacatcgagaaatcgcttcatgtccgcgatttagtgtccatgtccgctagattcatcatgactcatatcgcctcgggccaagttggatcagtttcgtaacccagagtctagctagtctcctgtcttgcatgtcttgcatgtcttgatcgtctaacccgacaatctattgtatagtgtagccacctttccttctaaaggacaaagtggacagaacctaaccagtaattaacgcaagcagaattattccccactatgaaagcaggtctcaaaagtcggtcgatctatcggtcactgcgatagtattccggcatcgctgaccagaatcctttacgtcccgtcgtagccgtcgtccttctggcattcgtgctcgccatcggattcacgcttgtcatcctctcgtgcgcactgtggaataattggctgcctcttatcgttggtcagtaccgcctcgcccacatcaaagcttggtcgagtatacacatcccgtctgatgtcgccctggtttgaacacgatcacactagccttcacctttgtcctcgcgcccctgcccaactcgatttgcagccgattagcgggaaacaacgatttcacggaagagtcgaatacgtgggtcctcatccccattcaacgatctgcattctgacctcgtcatccacacttgcctctactgacacaaccgtggtatcttcagagcatacacatcctttggccatttcttaaccggcaccctggtttcatccggattcgccgtcccgctcatcctactccattccaagctcattcaaggtccagcgtgctggatgagcatggcaggtgggagtctcgtctacggcaccatcttggtgtatgctggcttgttctccgaaggagaggacgagatgggtttctagacgcatgttgccgagatacgaccgatagatcagatacgattataccccaaacgaacaatgcggggagggcgggatctcttcagctctcaaatgatgagacgtcgccacactccagtcttgaggtacaccgagaaatcgcaagaacgctctcgtcccttcaaagctcggtttcgtacggggtactgcccttctggatcagccttttccgcgtcaattcgatggtcccgtgcgatctcttatcccgaatgtcaactcagagcatagagatcagagccaaagcggcatcgctagagatccagcagtcaaattgcttctgaaaggcccgcgttttctccagctcaacacgcttatgtgccgggtgacagagtcggaatcggaggggcggtttgagtacgcccatctgaaatcgacgtgattgcagcctgacgaacgcaaagttcgcaacaagtgatagatcgtacttctcagactgctccctgctctgacatctgaacgagtctgaacgagggctttcggcaaaagtacctcgtcaacattctcgcgactagcaaggcggcaatcatcttaatgtttgtttgcatatccatccgtaagaaatcgaagagagaagacaaataatgagcatgccgcgtcgtcatcaagacgcagcgtcgtggaaccgcagacgaaagggctaggaaggatatagctgagaggaaaacagctgggagagcttgtcacgggctcatgactgtttgctcttccacgctaggtagtcggacctgacagcggctgcctggtcggtgtatttctgtgaccgtcaaagagcctcgtcagctcgagcgttcccggccaaagcgtgtattctgtcataccgccaacgacccaccttcttgtcctctgcgctcattgtcgcccacgtctctcctcccttcttgctcaaccagacctgcatatctcctttactgatcccctgctgctccgcctccctcttcaatccctcatcctccctcaattcacgcatgtaagcaaagaaccctccgatcggtcggggaggctctccttcctttttcgggttccggatgttcggcctgagcttggacccgtccgcggccgtgcgtgcgaggttggggttcgtcagcggtcgagggaggatcgagttgagtcgttcgagctcggccggggagagcgagttgtagtatttcgagtagagagacttgtaggtctcttgtgcggatttacccttctgtacgtagggctacgggggagagaacaggggttgtagagacagtggcgttagcgatccatctggatcgaattgcgcattcaaggccttgtgatcgttcttcagagggacgtcgagtcggggctcgatcatgacccttcttccccactgtcaaacgcatctccctctggacaacgtccatccgagccgtacgttccaacgaacggggtcacgaaaagatcgctcaccttcttctcgtcctcgctcagcgcattccatttagatccgacggccttggcgacggccctggaatcgaccttgccctccgaattgagatgatcgctccgtatgttcgggtagacctcggtgaagaagtgggcgtacgatgacatgggcgatttagggggaagaggaacaccggctgagcaaaaatgacggatagttggcgtaaaacggtaaggtaagtgcctgtttgtgtttctgcaagcggatggtaacagagaggaagtagggtctcaccatcttcgaacttcttgttgacgaggttgaccacggcgctcgacgtgataggtcgttgagcgcgcaggttgcagcctcggaagagggtaggtaggagctttctgttcattatgcaaggttgtctatagcttggaattgacgtcaggtgtaattgagagctcgacgcagaagtatcttgatggttgatagttcagaatgatacgggatgattgatgatgatgcctgcctacctagcccgggtagctagcttggtgactgctgcttatggacctgagactcatcgtccacccaagttctggtcaagcacagagagcgtcatagcgacttggatggctaggctagttcaagtacgacctgaaataattgataccaaacacattctgccctgcatcccctacttgtaccaatatgaaagtcataccatttcatgacctgagccatattgcgcaatcgtgttgacgatccccctatgtgtcccgagaagaccgggagtgggtagttgcaaaccaattgagtattgcgcgcgggggattttccctagcgagcttgcttggctgcttccccctcgtagcctagcctaccttgcctcttgatcatggacatggacatgtaaccttcgacctcgttccagtgatcgtacccttcgctttagaccacttgcgccaggattgcgactgtaccctagtactccgagtaatcacctattccttctcactcgaatccttttgaattagccttctattcaaactcgtcggtcacgactttgacggaaccaatctatcagaacgttgatcaatctcacacccgctcaagttgttcgaccatgacccggtgacctgaggcccccctttcccaagaaaaccgtcggtctgtcatctacctcttgctctgaattactggccgatttccccgatacctctgctagcacgggcgtgcccgtaatcatcacttgcgtgaccgtctcaggatgatcctgccagaagatccggaaaaggaggctctccagcgtcaactcgatgctcacgaccaggctatccgtgaccgacgtctggtcgaggctcagggtcatccgcctgataaccgatcccggacgagtttggaagggtacaccgggttggcactacctcctcctccttacaacccggggctggtacataggagcgtgaatgggacgaaccagacgcaggtctcgtccaggtccgggccgggtcagcctgtcgaccctcttgccaggactcccctcgcacctccgatacaccctcaaacacccctagtctatcacgaacacgcctcgactcccttccagcgacattacccttacccttaccctcaagccgaggcgtcgacatcccaggtcacgctcccttcgaccaccacggggaacgacacgcgtgaacagttcgagattgatgattcccatgcttcttccacacacacgtctgggacgcctccacggcggagagaaagacgtcggatctgggggatcttgcctacgggtcgaacagaacgggacgagggagcgctcccgggctcatcagcgtcgtcgacaaggggtatcagcctcgtcggtccggccaggcgggacaaggggaaaagacgtgaatggcagggaaccgaaacgagggggatcaagggcctgttagagccgcacagtatggtttggagacgatggagtacgaagagatggatcttcgggatcgtctttgtcctggtgagtcggttcgtcacgggtcttggcaattggggaacgaggctgattgcaaactacccactccacgccgtcttttgctctctaggtactagcgagcgggatagcggggggactcgtcggtggcctgacgcttggacggcggaatgaaaagacgagcaagatctataccgcagggggtagtcggatcgtcgtcccctttgattccaaagggtacctcacgtttgacccgatgaagaacggacctccaccggaagatggtgcttcagagaggtgcaacctgttctctccactccccagcagcaacatcctacgttccgtcgcctttgcgccgtacgggcaaacgatcacgtacacgacattttacctggacaagaacgcctcgtccctctttatccgatccaagggggattcgtcgtcaggttccgtacaggtgatggggacggacgattatccggtcttgcaagccgggcagataccgcaagacaaggtcagaattgacgtcgtcaagcggacgggtgccaacgccacggagagtctggtctgcaggatgagcgatcagacgggtagacaaggcgtcggtgtttatgtgagtagtcttgaaggaaaacatcctctgcaatactgcgggcatctgatgcagagaacgctcgctgtacgcagacacaatccctctcgaccgactccccagacgaggtcgtcgccggtgatccgaacctgtcttttttcatcctcgtccgatttcccccgcccgcttccatgcctttgagttccgacggcgaggtcaattcgaccgccgtgtttgatcagctggatcgcaagttgaactcgttcgaggtcattacggatcaaatgggcatgcggatgggcaacatgaagggtctggcgagctttgatagtttgaacgtgtcgattggtcggggcctgataggagcggatgtgagtagatcaattatcattatgatctccagctcggacccttacttgcttttggatgattaatagtacgtcgccgcggacgaaatgaccctccaaacgcggacgagtagtctgtggggaacattcaacgtctctgagagtctgatcatgaactcgaccaggtaggtccggagcagccgttgcaccccgtgacatcgaatactgacatggccgcgcttcccaaagtggtggattgctcgccgatgtcatcttgcacaatccagtacgtgacagtcgagaattcctttgttgctagcgataccgagctgaccgccgtcatctcaacagggatatcctgattcggtcacacgaggtggatctggttactttcctcgagctggcaatacacgttctgccctcgatctacgtgcctttcacgatagcccacctaccgctaatatggtcttcaatcgtggagtgtcggactatggccccgtgccgctgaccatggatccggacgacgttcccatcagaaatatcaaagtcagggcacaaacaagtgatggaccgctagtactcaaatatctcgctcagcctcctggggtcgtgctcgacagcggggcctatacatccaacggtgaagcctcgacccgcatgcatcccgcttttcaaggaggtttcttgctgtgagtgtagcgaccggtctcatggatggctctatgctgacgattggccctgtgtcgtcacgtcatctccagtcgctccgtcaatggggatttacgtatcccagaatccaacgaccttgagccttcggacaatggtattctcaatttcgaggatccttgggctgaagatcgcaagagagtcatcgtcttcgatcaaggaaataacactgcgttcggagagaatctcacgtcgaccgtagacgactcgctatccccatggggattcactcggggtcagtttttgtagtggagagcgagccgtcacctccatcgtctgacatgctttttcgccatatttccaggtgactcggtttacaacaaggatgctggttcgttccaagtcgcgggtgttaccatgtggttgacaacggaagaagtggcagagaccgtcaacattagcagcaaggctatgacagtcgcaaaggaatgtgcgaatcagacgtgtagtggatatgcggccatgcggaacagcaagagcgtgactcagacaagctggggtggaggggaactcacattctcctagatatgtattggatgtgtatataatctaagaaataattgtattggtttatgtctcttctacgtatcgaaatgtctcaagcacggctgcgacaatggtgctcgctaagatcaaacaggtctcgattgatcggatggttttgcttccgacgatcttgctcgatctaggtcgtctaaaggctcagcagcttgatttattgaggttcaacgtggatttttgagatctactacagctcaggctagaaagaggaacacccggtcggtctcagtcattattggatgtcagtctcatgtctgccttattcaatctgggcaagaagccgaagcgggacgattcagtccgccccgtcgttacctatcgacatgtcttgactcctcaagcaatgaccgtgatgtgagatttgctttggctccatcgagatcgtacagacggctaacacaattttataggaaccccttgtacgtctttcagttcttctaaatgcgcgaccagggcgagactgagatctccgttcctaatccgcaggcgggtcatcgcgcattgcgatatcgatgctgcatatgctcgtgagtatgctatatgtgctacactgggagtgtactgaatttacaactgctcgcagaattcgagatggttcgcctggggatcgctgaggaccagcctgtctgtgtacagcaatggacagggttaattgcggtgaattatcccgcacgtaaattcgggatcaccaggcatatggatgtgagctgcgcccaacaccgctccctatgggcaattttcctgaccgatagatgtgactgtcaggtacatgaagcaaagaagaaatgcccgcatttgcaaactattcacgtcgcgacttgtgagtacgcccgatcattcaaccgggacagctttatacgagtccaggtctgaccagtccttatcagatcgagacggagagacggagcccggatactggggagagggagatcccaaacatcacaaggtgagtccgaatagagaacattctgactccgaagtgcatggacttacccttccacacccaaaggtctcgctggatccttatcgacgggaaagcacaaagattctggctgtcttcaagcggctcgtcggagatgtcggtgaagtcggtatgtccggattcaccgtgaggaagatatcattcgagccgttcgctgaagtgatactcggaccacgataagagaaagcttccatcgacgaagcgtatctcgatttgacgggtctcgcaatgcaagagatcttgaatcggctccctcacattggctccctcccggaagatgcaccgttcgggcttgatacgccattacctccgccgcctcccatcacatgggatcctctcagcaatatatttcccctccgtggagacagcggtacaacagctgcagaagatggagacggttacgatggcttagcagacgaggaagctgctggcggttgggaagactatgcgctgtctgttggcgccgagatcatggggcgaatccgggcagaagttaagcgagaacttggttatacctgttcagcggtcagtaattgagcgagtgaccaggcgactggctgttgcatcgggctgagtgccttgtcatatcagggtgttgcgcacaacaagaccatcgccaaggtgagattacatcttttgcacttagcaccttatgtaactaatttgtaccacctttgaagctttgttctgcctggaaaaagccagacgcacaggtgattgtcgcctttaatcggctgggaggcagccgtactaattcatacgtccaacatagactatcatgcgacaagctgctattccagccttcctgaaccctatgcctttcaccaagatccgcttcttgggaggtaagctaggcgatgccatggcgaaagagtacgaagccaatacggttggtgacatgctgtacgtggccgttacactaaaagttacaggggttggtaactgaaagttacttaccctcgcagaactgtgccgttggacgagatgcagcggaaattcggcgaggagagcatctgggtctacaatatcttgagaggtatcgactataatccaggtacgccaatcgcctcgctcgttcgcgggccgatctcgatactgattatacgtctcagtcaaggagaggaccgccaccaagtcgatgctggcatcgaagaacgttcagcctgctgtgacaagtcgagaaggtggatatcattggcttgggattcttgccggcgaactatatgtgcggcttcgggatgctcgagatgagacagaaggtctctggccaaagaccatggtactaagtaccagacaaggtcagtgcgacgtagcaatggatagttactgctaaacatgctgacgcagcggcagatatccatagtcggtgaagcagttcgatcacgtcagacagcattccctttcactcggcagctgtcagcggattacatcacgaagtacgccaacaggctctgggacgaggtttccgagcccatgatgcgtcagatcaattcgaaatcgtcagctatgcgtatcaacaacgtaagcctcttgatatgcgcctttccatggcgatagtctgaactatagtcgtatgcgttgcggcagcttggactcagctttgctggactggatcgtcttgaaggtggacaaaaaggtattgaaggctttttcaagaatggtaatgcccaatccagaggaatcaaacgcgatcggtctccatcggctggaccaggaccttcgacagaaaggcagactgttaagcggaacaattctggtccacttaaaacgtcaagtccagaaataatcgagctctcagacgagtcagacgcagaacagtcagaccagcagacgcaagcgcagccgaatttctactgtacccggtgctcaaaaacgatccgttcaggagcgaaagttcacagcgacggtcagcaatcgaatgagcaaattgtcgaggacatccggcgtgaacacaacgattaccatgtggcacgggacctttatgcagaagacatggctgggaccagaccgagccacggcaactcgtccaagctcaaaaaggcgaacaaggtcgttaagaagcaaaagcccgaaggcatccgagcctttttttcacctaaagaggactccgccagaacttcaaagccaaaagatagatagattgacaacagttacacgatccacgacttaacgacaataacgaccacggcgagatcttgcagaccgccttgatgtacaccacgaaaaagtgggatcggcccgaattttagcggcttgacttcaatcaagctatagatccggcaggggcaactcgcttgcctcagggctgacgctcaatcttcgacgctttcgtcgttccctgcctaacgagagagactatgatttgcgccgtttgcggatagattagaggatcgctcgagctctgtatcgatccgacgtactgcatgactgtgtctactcttttcgcttccgattgaatcagacttccctggatcgctgtccacaattgtcatcgcaatttcgactgcaccagcgtctaacagtcccctggatggtccctgtgaacttgaacatccgggcgtctcgtcggggacgggatcctgatcgcggtcaggttcactggcggtggtcgaagataccgagagatgccttttcctgttgaaagacatggtggcggggatttgcgaaagttgctgcagttcgagcatcttggtctcatcagattgtgcgaattgttccgcagggttcgatcccgcaatctgatggcgttcgtcatgcggtgctctcgaattcagggcttccaatagaatacattgaagatccgtgaccttcgtttcgatatgctgctgaagtttaacttcgaccctgccgagcgtttcctcgagaacggcagagaatcgattcccaacctgccgaacgatctcggtcgtctgatcgttaattttcctctccacttctctcgagaattgagtcgagttccgatcgttcgcggacgtgatccggccaataccgtcaccgatccgtttggcatcctgttgaagctgtgcggcggtcttttcttgcttcacgatcgcttgagcctgcttttccaggcatgaatggacggattgttggaaattttgaaaagtcgtagggatttgcgtcaggggagtgagaagggtgagaagatgggtcatcaacggttgcatattctgggatcgattatgctttagcgacgactgacttgcgaagatacggcgggctcactttgagtccgtcccctagagtccgatcattcctagtatctgccgataatgtgtggagatcctgctttacagtggcgagagatgcttgaatttgggtgcttaacatttcgggcaatctttggtaggtatcctttagctgatcgaccacggtttgcatcgtccctcgtagaataggaagagctacgaaggatggacaagactcaggatccaatacgtttgagctcgttctgagggaaagggacaacgtaccctgatccctgaaatggtctcccggagcttctttcccttgacactctgcgtctcccttgccttgacccattttgacgtgcaactctctgactgtctgatgcagctccgccacccgggtggttagggcttgccaaacacggggtcagcttgggagtagccacagcttttggcagactctagctcactagcaatactgccgcgcaatgcaaatacgagagagttttgcaatttgccatcgccttccgattggttgctagacgtgggcaaacgagcggataggattacaggcgccgctgattcgcgagagctggttgtcaagttcgtaatcataatctaccagagtggccggggtgatgttttcgaagggaaggttacgcttgagaacaaagcaaatgaagttgaatacgcaatgacatggcatcgtattttctttgtgtcggccatcatagtgatcgaactctcgctcaccgattctcaacacatagcggcgtgatgacgatcagcgatcaatctatgaaacgcgtagaaaataacccaaccagctgattcatccaaaactcgattcactcgcgtgcaacgagcgatgctaaggataacaggttctcgtgattgcgtggccacgactagcggtaactatccgagagagccctatagttcgatcaccattagaagattttcaggcgcgggcgcccaacgggtatttgatcgcatacaggcagtccagggactcggttatatgtttacaattgctattctggacaaccatctatagcttactgatcccctccatctcgatatcaatatccgcaccatggggcctcttctttctcgtcgctcgggcctctccgcccaaaactttcgcttgcaccttgtcctttccaaactttagatttctcatcaacttgttctgcatgaggcccttgtgctgtcttccgagcaagcggttgtgctccatccacttgccaaacgccgaggtgggttcatcgtaatcgtccatctcaccaaggcctgtaggggcaacctcggcgtcttcatattgaccgggattgtcgaatttgccatccgcagagcgaccactgaccgcatcatcgtcttcttcgctggacgagtcgtcctcgccgagatcagacccgtcgcctccgacatctcggtcagcagattgcccttgctcaggctgacgaccctgccatatattttccacctccttcttcctgtcgttggcgccaaggaattcttgacgtcctccgatatcttgcgcgctttgccaggcgtcgtagacatgggctaggcgcttgtcgcgtttcgccagcttacggtgagccttgctgataccggcaaacagattgaagccgacgtccaccatggggaggtgcttttggggatcctcctcattcctctccatcgcagccgctcggtccagggcgagatcgcaggccttgtttatatctggagtttcgtatatcggaacagtgcgttgacatgtggaattgtcgggtatttcttgcaatcggatacatgccataccgaggtagatgtctttcttgagccttccacttcgccgcatgaaacggaagaccaggaagcaggagtggcgatattcgacaggtacggcatagacaactcctcgatctggtaatctccagtccagcacgtcaggtttcaaagtaggatccgacgcatgctctgaaatagtgttcgtcgaagccacagaatgggtcgacgatatagacctccttcccaatgactgtcgccgtttagccggagccacatcggtgtcgtacgggatggtcttcgagtctgcgtcggtttgcacgatcacagcgagtttattcgtcgaccaaccgggaggccgttttaaagaaaggctgttcaaacggattgtggcaacctcgtacgagctgatcccgtggggaagctgagcatcaaccgctttgaacaggagagagattcgcactggatacacataggcacagccgtaagaaggacggacggtaacatgccgtagcagacgtatcgattgctcacctgtcccccatcccaaaccaccaaggaggggatacgttcttgttagctggcaagctttgctgaatgcagttgacaattcgatcgaagtgaggccaagaatcgggtctgcgccagaaatgcggtcgataagcgagaaatgacgataacagcagggcacgtcacggaaactcaccattttcgcgatcccgctcgtctctgataacgacaaccaacctggcctttgaccaatctcggataaatcgctctcctgttgcgttccagtaaggagaaggattaatctgctttgttcgggttcgatatacaagtcgaccattcaggatgacttctgcataggcactaggtggcctttccgattcccaaggcatcgagtctactacactctcttgcgcaggtctaccacctgctgcactcgaatgcctcttgttggactgcgaggcgaatgtctttccggtccgctggtactcgagattgttgcattgcgtgacggcaaattggaggataccgctccgacggtctaggctgggtctgacagacgcctccaacgtctcgcgggctctctcgcccgtcaaccaagcgatactttccaaacgacgcttgcgacgctctgcctcccaagggaatggatcgggtgcgagtctgcccatcaagctgtaaatcaatcccggcatctgtacttgtccctcccggccggttccaatgtcgttttctccgtgtttctcgtgttgccactcttcttcaccggcagccttctgcaccttgccgtcttcgggcatcttccaaagcgggtagaaagcatgactccaatagagacgcccctgcgcaggcataccgggccggctcggaacgagttgagtctcctcttccatcatatcctgtttccgggatcgtcggttgcccttttcaaggagatcggcaagatccacgtcgaccatacctatagcatcgtctgctgagaaacggtcagaatcgtatacaacgatcctcacgtgctcgccggattcgatggcatcggcgacaatcaatacgtatgcgtcttcctcccaacggggatttaggctatcgacgattgtccttgtactgaatacgggtttgctcagtttggagtacgccactgtagcatatggatcagaagatccaaaggtatccgccgccttgagcccttctgctctatgaatcctgatgtgaagtatcccaatcgcctcggtccgcaatgcggcttcttcgcccagcaagagacggtcgacgtcgagtttgtacgaattcggcctgacgaatccgtcggcgacttccagaatggccttttccatgaaaggcttgagaaacgggaggccaaagaaatccaaggataaatccttgaccggtttgatggccagatcgaagtcggggagtttaggtagcgagatagatgctgttcggacaaaaggtacatctggggagagtaagagtcggacgtggatctgaggggatggcaacaggtgagtggtttcctctgattggcggcaggccggagtgagtgcttacggttcctgtgatcttgagcatctctatccatatggctaattctcgacatcgaccctcgtcagctctctgaatataccactctgggcatcgccagactgactcacgtatctcagcgcctcccacccccttcaaacccagccccatgtagcacaagaaatgcagatcccagccgttcctattcttccttccgtcgtagctaaagtcgacggcaaagttgacgtattctcctccatcctcatctccatctcctttttgttcttctcccctgatatgtgtcccttccgagaaatcggcgtgacccttcttctcgcctccttgctggtcctgagcggcatctcttccctcactcactccaacaccgtgacctcgcctcccgccgatcatgcgcaagatccgatctcgctttctcctctcgctaacctccatcgagcggaccttggcatccgtctcgccatttgcaccaggctgttcatcctcggggagatcgccgcctgtcgcattgtggccgggcaagatctttttgcgaaacgagtcgagcgtgcccatcagtctgccgttccggttggcgggtgccgaaggagccttgctgagattatcaaaccactgaagtcatgcaagtacccgggaagatgagcctcccgcggttctcgccgtcggggttcttgctacacatacctctgcgtcagacatgggccgcatcgagacgatttgaatcggctcttctcccagcgaaggtgataccagtctgacagaagactagccatcgcggtgtcgtgagatttatatcagctctctggccgagcaattgattagtcgctcaacgcttatcccggggctcaccacaatcggaggcacttgtgtcaacaaggcatcctcgacaagatcgatgaacggggtcaagatgtcggtattgataagggggaacaacgccctcaacgcatggttcatccatccgacagattcctcgttgtacctctcatgctcccatctcggattcaaccccttgacccggtcccgatcgacttcagggccgaaatccgtccgtttgatctttttccgtttccattctgcccagatataccagctgaccagaaggccgaggagcatgccgaggaagctgactcgaaggtaagcgagcgtgatggggatggggagtaggaggacgacggggagggatggcatgggaagagggatatgcgggtcctggtgaggagccaggggtgctggagtaaagggtcctttcgccgacgccctgttggctgcaacctgagccgggatgggaggtggggcagatctaccttgagtagttgcgctaagggggatggcggatgattgcggtgtggtgagtcttgatgcttgggtacgacgtgtagccggggtgttaggctcgggcaccgacggcatgctccgggtcggctcaggtgggacttcaacttcctgtacagactcgtgcgtcgattcgaacactgtggtgtcgactgtgtgtggatccgttgaagagtcttcgggctgatagggttgcgccgactctggaacattggaagctgtgctttccgggacctcccgcacggccaccacgactgaaggtggaaccgcagcgacaaggacgtcctgcttcgatacggcttggagtgtaaaatcggattgagtgggctcgggcgggatgattgccccgcctggaggttctgagcgcaccgcctcttccgtgagcgtcactatagcctcgctctttctcggtggaagtggagggggagccgtcaacggcaaagctggggccagaggaggagcctgtccggcggacatatccagaggaagaggcctttgttgggattttctttgtggcaagggaggtggatcagacatctcgctcatttggcttgtatcctcgagggagttgtcgaacctgactttgggctacttgttgaaggtgactacagcgagctctttctggcatactcccgttgaactgttgattgtatactcgaatgatgacgaaggacaaaggaggcgaatacctttcgccctgtagagggagatccaaccactcgaccgtacaaaagtgcgtgagctgcgcccctcttctggattccacaacaactgcgtaaggtttcggtggatcgaattgaattatgaccgtcggctatgcccgaatcataaaatctggctgtgctctgagtcttctctagctcgatgatcaaaggtcgattgaggcagtaccaatagacactgtgcgtatgtcctgagccgtgatccttctactcttgccataagcagcaagtcaagctgaccaagagtctgcacgctgcgaggccgatctacccaaaccccgtcggtcagtcagtcattcactcgctaacaaaaggtcattcactcgcttcgcttcaccttctctcgtccgttcccttcggccgccgcctgcccagagtacgtcataggtaacggggaatatcaggaacatcacgtgactttgccataaatagctcgcatgccatatcgagcaaaagcctcaatccagatgtcagcagcaagtgtgtcaagtgtgttactgacaggtagccttttgcttcatctcgactaccaatgcagggccactcaaaacgttgttcagatctagatctacagattcataaaaaactattggaactcgcgggtcgactatttcctttccacgacatcgataggacctttcctgactgctcgcctcgtatatatccgactacctcaatccagcacagggggggaaaaggccggccgcgatatgtctagattagaaccgatgctttttgaagcattccattgagaccatgaaatccgaaactgagacttccagtaatcggaccttctcctttcccataattctgcatcgtttccgcgttaaaggcagtgccgggagtgcaaaacaccgcgcgttcttgtctaccgtcattgcgcttggcccgatgaagctcgacagcggccgaaatgatgctcttcagcctcgcacttttctgcaaacaaccaagatgtaagccaagcgcgagaaaggtgcatggacgaatgaacaagacggactcggagctccgagcacaagcgcgctaaagatcctcgtccagagcttttccgtcaattgacatcgcagcggttctctctccttccgcgctttgggccagatcctgtaggacagaactttgaggctgaggttcacatccctcagatcttggtaatactctgcaccagtcttgtcagaggtgggaacgaggtccgcaagaaggcttctcttctgcttgagaaggcgggatttctcgttgacagcctcaatttcgatctgagctttgatcagtttctccgaaatcttccggttggtcctcttcaaattaagaacgtggtcgccaaggtctttgaccttcaattcgagctcgcccttctcggctccaagcatagcgaggtccaggcgaagagctttttcacgggtggaaatggcgtcgtgcttctgaagtttcgaaacgtgcaaagacgatgtcccgatgattgcagatttaggtcgcttgactttggcggcgatatgtttccttggcttcctttcgaccgccggaacccggtagtcttcctcatcgtccgaaacagttccgatatcgatttcgacagtggggatgccggtacgaggtatgctgcggcgaggcccgactcgccggacgactgatatgccaatgtttgaactcgaatggaggtcaacgtttccttccttgtttgagcacgactcaccaatcatcgacgagctcgaatcttcagcttccgataaacgagattgcccgccggccttgcctgcatcttcgaagtcgcctcaacaacatgaccacctttagggtgcccaccagcagattccttgaaccggcgaaacttaccacgacgcctaaccatattgaatgaggaaagcctcaaagaatcctcgaacaaggcctggacagatgggcctctgcaatgcgttcggatgggaagcgcgaggaaagaggtgacagggtagagacctcgaacaaggcgatagggctaggtatttatatgacaacctacctatcggaaacccaggcagcaaatcatcgggttttcagagttgttgggcagcccgaggacacaaagtaccaaaggtacccgcagatctcgatgacccatctgagagcaaacaagcacagcattggaatagaggctcaaaggattctcttcagctcgagccggagacccgaacctgatcttgcgaatgccggccttgtcgtagtgatgtctacagcatctcttccgacctgccttgtgtgtgggatttcgatttctcaccaatcttgcccacagaaggaagttcagcgaactatcgtaaaatgtcatatgattgcggactagcacgtctatacaaccggatcctaatctcgccatccgccaaggttttcgtagtcaagattcattcagagcaaataggccatctcttgatccgactagctggaagccgtttgaccgaccctctcggggacaatcgggtcgctcgatgtcgtcactgccgaagcgtcgttgaacaatctgtctttgagaatttgcgagatcatcccatgctgcgcttctgccgtgatcctcgcactgtacaccaaaagtaatcaaaatccggactttggttcggctcgtcgactcgggggaactcacccatccttggcggtggtcgtcaattgcgtgtccttgacctcccacctgacctccttgccggaactactctcaccgcccacttccccttccttgtccccgtctttcgagctcctcaggatcctccctccggcatgttcgtcgccctgatcatcggcatttgcaccagtcttgcccttgtccttgcgctcgaccttcttgtgggtgacgctcgagtagagatcattacgaggttgcccgaccgtccccccgattcgggtcaatttggcattcagatctttcacttgagacagcgtgtattcgcgggactgatttcggcgtctgtcatcagctagcaactcgaaaacattcacagcgaaccgtgctcaccgtgactatctgactctgactcaatgtattgacccaatatttgttccacaacaggtctaagagcttggtgtccagactggatttgaatacggacaccttgagctgatagtaggcgttggcgtgcacgccgaagtcttcaatcttgtcaagagggatggattggtagtcgttggctgcagcattcggtggcgtgtagccctgcaagtgggatggagtaagacgtcagtacagccagcgagaacgacatgttggatatcgagcggtagaactcgcctcagggtatgtcctgaaagctccgatttcgaccttgcccgcagagacagtcctgttcgggtcgatctgaggagagttccacattcattgagttccatctcccgatgtcgctagacaactgtcgagttgcattcgatccaagactcacgacgacagccaagtagggatcgttgaaagactgattcgtcgactgcgtgttcacgtcaattcccgacaaccagcacccgtatccaggatgactattattcggccacgagcaaacatcagatcgacaccctcacaccatacctctacatcatccgagactcacctgtggtaccaccctacgaccaattcgttcttcccaatctcctcgttcccctccttgaaattcaccatgtactccatcgcagcgtctccagcattcacacgggtctcggtaccttgtacgggtagagcaaaggagtccatgacgatgaacgatcgatccttgatcttgccgatcatcaggcccatgatctcgtattgacctccggagcgagcgtggatgacctgtagagatgtatgggacggatgcgtcaatttgagctcggggtaaggcagtaaaggtatagaacgtgactttaccattttgatcagagcgaccgcagaaatcttgacttcctgaaagtaagccgggctgggattgcgacatccggatgagcaccataagaaccacatgcagcagatattgggctcactctttcttccacggctccttgttcaggaggtccatctgttcggctcgatcgtacttgtacagctcatcggtcgccgataatgtctacgggggtgcgagtagcaggatgagcaacgacgatcggcagactgcgaccgggacacagggataggctcacctgcacgtcgttctcgatctcgaaactcttctgtgcgacgtccatgttgagtttcagacttatcgtttgtcgccaaatgacctcggctggttgcagttctgttgccgattgaacgatgacgaatgtgtggtgataaatcgtactgaatcctcgccgtatttcgtcaagggatctcagcgtagatggccgagaccgaattagttcagtctatgcttgcgttgatctatctgagttcgcgaaaggtaggatacatgcgactgcgataatcacaggccacggcgatgtgtgcgggggtgctggtacactctcactcgcatctctagctgatcaggtcgacttaggagatgagcgatcgtgacctccaccctttcgtcactttgacgccacggacaaggattacggcatatctcggctgctccccttagatgcactatctcgccagcttgaagcgcgcgcggatgcgcttccgttttcaggaagcagtctatgcgggtgaacgagattgatgggatgatgtagttgatcatgcgattttgaaagagtcgagcccatcagcaccagtgagaacccccaagaaagcaggactcgatccgattaccagccataggcacacgctcgcctaccttgccctagctcacgaaagagaaaaaagcagctcaagatgccgcccaagaccaagacggatgacaaggtgagctcgagctcgaggagcgtttcgtcacgcgagtttcgtagtggccactgacggacgtcatgtgccaatcgctctctatccaaccatgctttcgacgacccgaccgcagactttcgggatgaagaacaagaagggaggaaaggcgcaaaagttcttgaacaccatctccaagcagacggctactagcggaaagagtccgcaggaggtcagtcccgagctcctcctctgctgcatcctggcagtcactatcttccgccaccgcaatactttcactgaaaccccccaactctgcactctagatcgccaaggaaaaggctaatgagcagaagaagaaggaaaaggagatggccatggctcagaaaaaggccgaggccgagctcttcaagacggtgctcgtccagcccaaggtcccgttcggtgtagaccccaagaccatcatgtgtgtctttttcaaggctggagtgtgcgagaaaggcaagtttttggcgagaaacggccgacctggctttgaccccgtactcggtcgaacgtcggactgatgacgatcgcaaactctacaggcaacaggtgtaaattctcgcacgacaaggaggttgagcgtaaagtcagcaaagccaatgtctacacggatactcgtgagaagaaggacgaaaaggcgaccgacacgatggacaagtgggacgaggaaaagctgcgaaaggtcgtcacgagcaaggctgggaacccaaagaccacgacggatgtaagtgcaatgacaggcgcgtaggcaggggttgcaagaagttgaccgtggattgtcatgcggtagatcgtgtgcaaatatttcatccaagctatcgaggatcagaagtatggttggttgtgagtagctggataacaacataaaagctgacgcagctaggcacagtttcgctgatcatgatcgcttcctctgcttcctcttagctgggattgcgtgagtatctgacggctgcaacatgattcccaagcgtttgtgcgagatgaatgtcgctgacatgaatctcatcgcctggacctatagcccaacggcgtcgactgcaagtatcgtcacgcgctgccacccggtttcgtcctgaaatccgaaaagaaggcgttggacgagctggccaagaaggacgtcatctcgttggaggactttgtcgagaccgaggtgagccgtttgccccaacgcgatccgacccgtcaggccttgagctgacccttgtgtttgtccaaactcgctctcgacccatagcgtcacaagctcaagggacctttcacccccgtgacacccgagacgtttgccatctggctgaagcaacgtgccgacaagaaggctgccgaggccgatgcggcgcaaaaggccaaggcgacgcaacgtgctgctggacgtgtcaatggtatgagtggacgacacatgttcgagtttggtggacttcaggacgaggaggtgagtcgcgagccgagtgacgcggggtctgtttggggcttgtcgatgagagagctgacgcgtcgtgctccggacggatctcgtggtgcttttcgcaggagggagacgacgaggattgggacattcaacgatacttggccgatcgcgaccgagatgcccgagcagagtctgcggacggtgacggtgacgagcacggttaccgagaacaggctgatggtgacgatgagaacgacgacgaggagggtggtcaaggcgagggcaacgacggtgaagatcaaggcgagggcggttcgggacaggatcaaacagaggacgatggacaggccgcagcggaggacggggtggcgagcgctcgaggtaaaaacgcggggttgacggacgaagaggttcagggcgccgtggacaagatggagcaggtccgtgtggcgacctgagcgcgatacgcccatctcggtcgagcacagggatagatcgagtgttccccgaatccgattctcgtagcgagaggcttggacgtcgtcggccaaagtgtacatgcgatcacattaatatgtatctttatggactcgcggtcctcggtctcgtaccattctcgaaatctcgaggcatgcaccggacgatttcgtacgtggatgtgaaccgccgtcctcgttgtttcatatgaaacggagaggtgtaaaggtcggcttgtcgtccgcctgttgatccggtgatgcggaagaataggcatctgtggccgatggaaaggtccccttccgaacgagaatcctcgaggtaagaaggggagggacagatcttgcgagagggcacgggttgagggagggggggggaagattcgagataaaccgccgtcatgctcgggagttgatctgcgacccatcatctcgtcaaagacggtcgatcgcgcgccatctttttcgctcgctctctctcggcggtgacggcatgaccgaagcggcaggggaaggatggcaggcaagggcaagagaggctagcaaccgtgacattcccccttcggtcacacaacgcgctcgcgcgcgcgatcaatttcatcggtatcgcagttcatcctgcccccgttcctcctcgcctcgggtcaggggcagactgcgtgaaatgtgacgtcacgtcgtcatcatcatcatcatcacctcattcgtacgttgtcctccctgcctgcctgcctgccctgtgtctgtgtctgtctgttgattgatcgagagtgggagatgggttttgtgtgttgcgtgccagtgttcatgaacgatgacgtagtgattgcggtgactgtgacggaattccccccagtctggaaccgcaaaccgcaaagggcgggtcgtcgtcgtcgtcggcctcgttggtcgtcgttcgccttttgtatatagatagaccgtcatcagatcgatcgacgctttccgccaaacaatcacatcttcccctcccttcccaaacaaaacacacaaacacacaaacacataacaactttcaatcgcctgtctcctccttcgtcgttgaacaattaataagaggagcagccgatctcaagacacacgtctccccctttccacccacactttatcccatcaaacacacacatcctccaccatgtcgcacgttccccagaccaagactgacatctcgtgagtctcaatcgtcttgcttcgacgttgcctatgacgctgatccaatccatctcgcttcccgcagcaacaaccccgcctcgctcggcgtcaccgcggccaacaaccccaaggagcaggaggccgatgtcgcccgaaagctcaagctttacggagtcatccaggccatgcgtgacggacgcatgcccgataacgaccagatcaacgagtcgctcgaatacgccatccgaatgtctcccgtcgacttgagcaagctctcccccgacggcaagcttttggtagaggacgtccgtgacatcttggagacgtgagtcgtcagggcctgattgcaatctacgcacgtggactacgtttctgactcggctcttgttcataccacccgcagcgcccgaatgatgatcaacgagaagaaccacggtgaattgttccagaactttgtctggtcgacccgaaagggagaccctacccgaggtgccaagtccaagtcggacctcatgcccgcttccaagggagagtaccaggccgacgccaaccaggctgccgcccacctccgaaccttgatcaccctctttgccaccaactcggaagcccgaaaactcttgcacgactttggtttcgtcgcccgtgacatctttgccaccaccgcttccaaggccgccgacaaggctaggcccgagcagcaccagctcgaccaggtcgacaagcccgccccttcgggcgagtggatcggacccgacggtcgaaaaatgggcaggaacgagacccccgagctccagatcaagggacccaacggttccgagttcagggccaaccccaaggacgaccctcgacacgccaaggtcgtcggtaccgacggtcaggagcgatccgcccagggcgccgttcacgaggcccgtgagaagaaggaagaggccaagaatgaggcctacgagcgcaaggagcaggcccgaggtgaggccgagaaccgaaccggtggaactggcggtttgaaagagcaggccaagtctcacttggaggacatccgaacttcgggtcaccccatcgacactgcccgtgccaagaaggacgaggccaagtacgaggcccacgagaagaaggagcagggtcgtgaggaggccaaccagaggtctggcgagcacggcgctcctcgggacgctcaggacgccaagaaccgagccctcaacgccatccccgaccagcaccgagagaagatgtcccgaggcatcgacgagacccgaaacatcatcgaggactcgttccccgaggagcgaagggagcagttcatctaccgattgaagaaggtcgtcgtcgactgccaggagcacaaggattaccaggaggccatgagcttcttccttgacaaggctgagcagtacaagggccacgcccagcacgttcagagccacggcaaggactctgccggcaaggtcgccgaggaccctcagtacaaccaggcttcgctcgaattcagggctctgctcgagaggttcgccaacggtcaatccatgcagcccttgtgggacgccatcgaccagatgtacaccgacgcccgtgaggacgagggtctccgaaactggtaccaccgcgccaacgagtacattcataaggtcttgctcgagcctggttatatccttgacgacgactcgaccaaggagggtgagaggctccgagatgacggaaggcagtactttgaccacaagtacaagcctcacttcaagaccctcggcaacgagatctcgcacttcttcactgccatgggtgatgacccattgaaccagcgattcggagaggactggaagaggttgaccaaggacttgttgttcgacgccgagggcaacttgtcttacaagcctaagctcttgaacgacattcgaagggtcatcctcccctcgattatcaggaacattggttacgttcccatccccagggccgagtactcggacgacaagatcgacttggtcattgagaacctcgtcttgcagggagccaacttggcccccaacgtcgtcgagatcgcttcgaacaaccacttcaagttctctccttacgagtcgatccccgaccagcagcaccacatcataaccctcggattcagccagatccaggctgacctgagggacgtcatcttccaattccgaaggaagtctggttggcccaagctcaaggactcgggtgtcgctgatgttttgatcggaggaaagggtatctcggtcaaggtcaccctcgagaccaacaacaagcgagacagcactttcaccgtcaaggacattgacgtcgacattgacaccctcaagttcgccatccgagactcgcaccacgacttgttgtacaagttcgtcaaggctgtcgccacctcgaccatccgaaaggccgtcgaggccggtatccacggagccctccgaaccgctctcgagcacgtcgacgaccaggtcaccgaggtccgaaaccgtatgaacgaggccaagaggtcggacgacaccacccgacgagacgagctcaagaacctctacagccgaaagaaggacactgccaagcagaacaaggagaaggccgacgagaagaccggtaccttcaagattgtcactggtgagtcgcgatagtaatcatgagcctatgcggaatacagttgactgactcgctctcatctcatccccgcagacccccacgagtctatcgtcaaggacgtcgactcgaagaggactgagcagtcgtacaccaagcgagccgctaccatcgaccagagcatcggcaagagcaacgactggaagagccccatcttctcgatcgtcaactcgagcaagtcgcaccccgcccacaccggcaagcctttgacctcgaccgtccgagacgccgcccacggtgccacccacggaacccacggtacttcgtcgggcgctcctcgatactagatgtgtttgcgtgcatcggtagtaggagaagagggctttgcttgaacgcatcaatctgggccatgtatcggtttttataatagcgcccgtgtgtgtgtctgccttttgatgacctgttatgacgtcggtttcgtgttttcccatatcaatcaatgtgatcgcaaacgctggttcatctggtccccgctttgacttgaggtttgaatctcaacttcggatcgagcgttaactcaattgcggaccggactggccgagtgccagctagctatatgctggaggagtgttacaccactttcttctgtactctgtcgaatttgtcagccttttgatggccgaagatagcacgaaataccggcaaatcgttcattcaatcttgcttcctaggagtcgcggacttctggcctaaaaataatacatatggagagagatgtagtaatacattggctcgtttgggagtttgaaactagatcgccaggcctaggcagcatacgatctgatcgcaggctcagaacgggttcgcgggacgttgcttgccaaagtgatcgtgtcgaagaaaatctggcgggtgagcccggcggtctgttcgaaaaagtcggggttcctgcaaggcgacatggacaggtctattttagcaagaggcaggtggattgcggtaacgtgtggggcgcttactcgataccgtcggtcaggtaactacaccaggatggttgaaagcgtgatctatccgggacacctccgtgctggattgtgtccgcgatgaagtgaaaagcgaccgggctgaccgtcatgctggagacggtaacgatactgtcagttgatctgctatggtacagttgcggggccagaccgacagcttacgtgaaatggtcctcgagtcgtaacagactgcagagctcttgtacggacgcaacagtagctcccggcaaagcgctcgtgggattgataatctcaggctgaatgatgtcgtcggtgatggtatatacggacaaggtgggtaccaatgccgagccacctcgcttattatgagctttgagatacttcgagccgaccgtctgctggatgacagatggaccgcacccgccttgcaaaagcatctgaggcaagcataccagcggtccttcagcagtacctggaatttgggaactgcttagcgtcccggtccaggatcaggatgtggaaaaggttaagcctaccgaaaaagtcgccggcaatgctaccaaatccagagacgagatttctcaagctcggccagtatgccaaagcccattggatattcaaattgccctgagaatggccgataacatatacgcgccccgtgctggacttgtaggccaggtcctggatattgtgcgctacgtattcggcgttgagttgggcatcgtcgagagaccggccaggaatcgttacatagcacacgtcgtatccgtcgctgcaaatgcagagtacagtgtgtacactcatcagattgagcgtatcccggtgtacgtgtcaatgcgacgtacccgtaatccggcaagagcatgttgtaaggccccgtggcccatgtctcgtctccagtcgaggttgtcccatggaccagatatacgatcccacccttcttgccctgaatcccgtttgggcaaatgatggccgaagagtatgccccgcagtcgagcgagtaaggggcgtccccggcagtactagggcatgcccttcgtgccaagctgttgtctcgagtttcgagaggctgagcgatgtcgttagtctggaaaaagtacaaggaggtgcgagtggggtgaagacgcttaccgcggctgcggccgaacatgccatcaagagcaaagtcaaagtttgagcgaacatcttgagatgcggctcaggtatcgagttgtttgagcgggacgcagagattttgactggctcgtaacgatgctgcccctttgcgccgggtaggtacatatgcgtaagttcataccaggcgaagaaagctcggcttcaattcggtgcgtcgctccaatctcattcccgaggcgacgaaagtctagcgcaaatgcctcgtgtttcgcttcattcgatcggcatctggcgcgacaccgagcagatttcccgcccgtcgacgccacattacatctcgcgcgcccgttagattccaaccacgatgcactcgatctcgtcggttttggatcgaatggttcaggtgatgtaatcacatactccgcgcttttctcgcttacaaccaatcctattgttcgtgtacgacctaatgatcacagcgtgatcagatcgccatgacattcagaacaccaaaacaccgcgtcatcactgatctgggattcgaatgtcggacccagatgagcccgatgtccttccgcttcttcctcttcttccgcgactgtatccgacggggcgattcggctccttccccctaacgaaaccgggggcccgctcatccgggctttgagcattgccaaggacacctgtcgcttgtgacgcatactcggtggaagtgatgcatctatcgaggcggatggtggcgcaatctgtgccgggattggaaccgcaaacgttgcagaccgttgcccatctgatcgtggtgtcgcgtttccaggatttgtagacagctccccagtggtcgccagttgtgcccgaagcgatgccagttcttgctccagatccccaatctgcttggacatgccgtgtaccttcttcgtctgctgatgaacatcgtcttctgcacgacggacagccgagtcccgttcagagatctccatcgtatgctgagactgcattgcggccatagcttcgtccttcgctgtgtcggccgagcgatcctggatgatctgctcggccgctcgcaacctctccttcagttggagtacaaccgaagttatcgattgtatttcgctttcaggtacctccaaggcatttgtcaaggtttgcaatagaaccctcgactggctgccctctgccatcgaggtgtcaagctgcgcgaccaaacttcgacgagcctcttcgatttcaagcttttcctgtacgagagcatctctttccgttgtcaggatgtctctctccacgttcatgtctgcgtattcctcgccagtcgtttgaatccgcgtctgatacacagcagtggcaagtccaattagtgacaagtcgctcagaacgatatgacatgcgcagccagctgacctcgagttccgctatcctcttcttctgctcggcaatcgtttctcccaggctttcccggccttccgctagctgaccgatcctccccctgacttcctccagctgctcaaggagacctttattgtcctcctgcaacgcctgtttttgcgcgaccgcttgctcggcccgttttgtctcctttgacagctgagtcccagattgttccagctcccgagtgatagaggcatgagcatctctaagggcgagcaattcactggatgccgtatcggcgtctccctttgctttctccaaggtcgactcaatttcagcgagcttgctctcggctgtcgatgctctctctgaagcttccttgcactgttcctgtaattcggaatacttgcggcgagcggcgatgatttccgtggcattttctgcatgttcctccttgagcttggcaagctccgattggatgtcgctcttcgtctgttctatctcggtttgggactattatcgactttgacggttagctcgactgtttccgccacagtcttactgacgcacaaagtcttacctgcttcaacttccgtagctcgctctccagcatacctccacgttccctttcgccttccagcctcccctcgagtgcttttcgtttctctccctcttgctgctccaggtctcgcatttcaccctgcagccgttctacttcgctttcgagcccttcgactcgcttacgaagatctcgaccctccccttcggtccgctcgagaagcgaggtcttcctctccagctcatcacgcaaagattcaagcttttcggctttcgtccgctcttccccgagcgcttctttggtggtgttcaggtcattctcaagctgagagatgtgacctttagcttctgccagaaggttggcttcggtctgcagctgagatttttgcgtctcgaggtccgagatcgtagcctgcaaaatggaaacccgatctccgatctcagatatccgtcggtgaagctcggcgttctccgtctcgagctccgctatacggggttctgacgatgatgcggtcgctgctgtagcatccatgtcctggggaaccgaaagcgatgcgtccgccgtctcctcgaacggctcgtctggctctgcagtctgtgcgtgatgttgtttcccagtgaccgacgtcgaatcctccccaacatcaactgcgacacctgcagaaatctcgactgatcctgacaacccattcggtgccaccgggtcgtccgatttccggtcgtccacctcgacagcggcatcctttgcggtttcatccgcatgcggtgtcaaagcctcctctgcatcgacggcggaagtcgcagcctggaccaaatcgtctctatcctcctcgaccccctcgttggcagcctcttctgctttcgccttttcctcctccgcggcttgttgcttctcttgagccttctttttcttcttttgggacttggagagaggttgctcgggttcggcgtcggcaggagcctccggcgttgcatccttcactgctggctcttgttcaaccgcgactgattctaggttatcagcctgaggagaagtttcgctgagctgaggctcctcgtctgctttcgtttcctcggccttcggctcaggctcggtcgtcggcaccgccacgtcgacatccggtttcttgctatcaaaatcatctatctcagccggtgtaggttgtttgtccgctgcagtttcggggcgtcgttcgtctatactgggcctagctgagccagagtcaatcgaatcggtcgtggtcgtagccttgccttcagctgtgtgcaaagaaggatacgattcagcttcgaaatggcattcgtgtcaaggacgaagaacccaccttcagccttcttttttcgcttagctgccagctgaatcggacaagcacattgtcagtagtgcaacaagatccatcgtgtaggtacacgtcagaccgcgactttgacataccaacttctttgccctggcagcttgtgcctttctctcggcgtccttgtccggatcggtcgacatcgttcctgtctctatgtaacaattctacctatgactgacattcagaccgtattgttctgcatgttggtgtttgttgacaggatgttgagcatctatcaatgatgtacatggatgttgcgatcatgatcctgctgggaagagatgtgatcctcttcggtcgcgggtggagggcgctggccgaaggtgaccgaccgaactagcgagcgaccgatcactctgttctgctcgaaagatccggtagacgttctcccatggcaacattgacatctctcaaaggttctgtcctggcgagcagctacaattacctagttggtcatccagaccttgacgctgtatccaattgtattctcgtcctcattcccaactctcaaggaccatcggaacctcgcaaaatggtcagtacatggggcatcgacggtctctcctgaaactaagcgacatcgcctgctttgcctatcccccgatcagcccgcagggagactagatagccaccatgtgtctttctgttttgacaagaaccgagtgatgttctcggtccctagtaccacgtgagccgcctgaccagaacgacttccagctccgccgacgagctcgtctgacacaatgacgttcctccgcctttcaagaacgctcgctcagctcaaggagacattcctgagcgccctacctcatctcgtagccggaacttcagaggagacttctctacccggtatggatgctgaagatctagccgccttggaccttccctcggtgtcatccgccccggcttcgtcctcatcctacctgtccagcataaaatcgacctctgatttcgtgctctggcaagctcgtcgcggtgtggacatggcagcgggtccaccagctggcacagacgggtcggacatcatcggatggtcttccctagaaggggatgtcaacgatgccggctttgcttcggagagcgacaaggtaggatcgaggggtcagatgattaagcggatgatcaaggagatgagtcaaccgacttggggcaggtgggtagagctatttatcaggtaagcacctgcgggcgtcatatctgcgaaacacgcgaaccgagaaagtctggagttgaccagtttcggattcatgaccatgtagcttcaagcaggaaggtgagttttcaatagagaaccaatcgatgttccagtagacagttgggctgatttgacgccgacatatgtcgcctagatggagagttctctgaacccacggtcgacctgccaaagatcgacgacgaagaagcatgagaagcggaaccccaaccgtcgacccggtccgcggcccgatcctgtcgacccccttccgttacgtcacacatatcgagtttgatatcgcataatacgatcccctgatcaattcgctgttgacattcaaaactccgggtcatgcaggtgaatcatgaacgtcgtgtatagtcgcgatttgagcacgcttggcgacatgtaatacatttttcggttctaccgctggagaaaccgacttgttcgatcgactctcctggtcgaacccaggacaaaatatctagactgactgacaacgtccgtaatgggaagaatacaacctcgtttgaattgattgaaaagcgatgcattgcagaataaaaacgcgtatcggtcggactgaagatgttgacaacggcctgcgagcctgaagcgagcggtcgtttaagcagcaggagcagcaggacagctgcccgcgtttgctgggcccttatgctcttgcttggagaacaagccatgatgacgtgactgtcgtattgaattggtgggtggatcggatcgcgatcactggatcacgcacttgcaaccgcctccatgttcgtccgcttctggtgctctcctaccgttctgcccggccccctgagcagccgggttgttgcccgctgctgtcgacccggcagcgttatttaatccaccttgagcgcctgccctcgctcccggtggaacgtgttgactaccgccctggcccgatcccggagctgaagtggtaggaacgttgctcgagttctgtcgagaggataaaccggaaggacggggaagtgtgggaagagagaagggcaggatggatttcttgggcggttctgttcaggtttcgcaatggcgggttagacgtctgcgctttcactcgtccgagaagcatggtacgagccatcggactgaccttcaggagcaggcgccatcgtccgaactgataaatgcacgatggtcgagttgggtgcgggtttcaagttgagacctggaatgcatacgtcgacctcgattcttgtcagctctccctacgatcagtgaggacttttagcagccgatcgccctgctcacccgaaagaacctctgtatcggccaagattctccccatgtacagcaatcggaaataatttgatgcgggcggtcggcctggatcggatttccaatctatcaatcggcgcacacgatgtccgaggaccttgtaagttgacgacgaacgcggccatcgagtcctggtctaggagagtgacaagacgtacctccaggccattctccaaagacgaggtctttgagctgttcgatggtcgtcgtgggcgggaaagcgaacgtatgcgattgaccggacatgagcaagatccggatgttcaactgtggagtgcgggccgcacacgggatgaatcggtatggttttagcgaaacgcgttcctactagaccttgatggggatagcaagaagactgactttgggcccttccatgacgggctccaaggctcgccgtttgatctcgactttttccctctcgagtgaactcctcggactgtctacatgcaggatcgggtgtttgatatcgatgggttctagatcgatgtccgaccgattattactgatgccatcggtgctggtgttgacgatcgtggttgggctatcagcggggacgttgagatcgttgagggggggcatgagggcgggggggaggtcagacgaggtcgtcattgatggaattgatgtaggtacacctgtttgaggcgggtattgaaccgtgttcggggtccgctgatggttttggttcatgccgcctgggtattgcatagacatcgaatcgtcgtagggaagagtcgtggcgttcacctgcgttcccggttggccatggtaaagtcgtccggtgttatcgtcgatgccagtgatggtgatatcgacgttggcggctcgctcggcgcacatgccgatcctttccggggcacgagagcctggatatcgacgtgacgggagacgaccacttgcttcgtcggctcgttcagcaagagggtaggagtctggccaggcgagtgttccacggaatgggatcagatgggaggtcggtattctgacgccgagacaggttttgatcgatgaatgggtattgactgggtgtgagtgagtgtatgtatgcgtgggtggtgtgagtgtaggctgtgtgagagcgaggtgggcagaggagacgggggggagtcagactgaaccaccttgaccgtgttcgttcaacttgaatccggtgaaatgatcccgcacaacgtcaatcgaccgaccggcactgaataattatatagctcattgctcctcgctactgtgaacgtctctatacacttctactaatccccgtggccatcgggatcgaccggacctgtcagatctcactgacgcccggggaaccgatcaccgatcatcgtatcgtatcgtatcgcccagcccagcccacagttcactgcgctgctcgctgctcgtcattgtttgtccgcagattgaccactcatgccacagcgtacggtgagagcgtgacaggttcctctctatttaccccgccgtggcccgcgtacgcggggttttgaacgaggggagaatctgccccggggcctgcttggcattcccttccccccccccacatacgtagacgagatcgcctggtcgacgggaaataagaacgacccacgtcccgcagctcactcatgaaactcgtcctgggcgaagtcggccatccgatacggcaacttccgtctcgcgagcgaacaaacctgcattctcgatcgcgtcgcacaattagtagtgtaagttggcataagtcgtcctttacatctcgcgcaaaaactcgggctattgggctttacctttcctgtcgagcgcgtcaaccgatcatctcatcgtgtcaagcgccatttccgagatccaatattggcatgcattcccttcggccaataccactaggagtccctcagtcgacttagtcccgaagcccccctcctcgtggaacgacattcgcgcctctcaaggtcgccgccggggttccagcacggacgcccttttcaacgggaaataaagtccctgatacatctcgcgtctcgtctcttccctctacgatcttcacgcggattgattgtacgatagtcctactcgccactgcagcctcgtcttgaatgttggcatgcataatgtttcatcttcctcaaacacaaaacgtcagcttttgacggcctgctgcaccacgtcgactgtatcgatacgtgtaacattcctgtgtccatctgccagacacttccgacgtcttttcgtttggagataggcggcgtagggttcacagtggccgttcaatcggcatcactcccgcagtagctaggaacgcaatgcgcagaagggaatccttccaatgcctgattttacacgtcgatgaaatggtcatcgaaagggctataccatcgttacaacatcggcttgcgggcttgacaaatcagtccacagccgtatcatcggaacaggaactggcatgagaatacctagagagcggagagacctagtatcagcgctgagcccttgttgatgcaaggtccgagactgtaggcaaagtatgactcgccttggaatcgggatcccagctctcccagatcgagtcggggtcctcttcctcggtcacgagctctttcgaggggatggcaaaagcgatcgtctcgtacggctccgcagcgacctgttcggaacgtagcgatatcaggacgagtcgatcgaccaggtcgaccgtcgatggcggtgctcaccaagaggtactgaatgctcctgttcacaacctcctttctctgctcgaaactgctcatgaaccgcttcctcggtcgctcaccctctttgatctcgggcaacatgacctggaagagcagacccagtcgagcggtctgaggatcccgtaccttggtgaccttgtatccaggccgaccgatcttgaggaattgtctggtggaaattgtgcaaggaggttcaagatgagtttctcgtagtcacgtctggaccgcttatgaacggggtggacccactttttcttgattccgtctggtccacccccaaagggatgctggatcatcaactgctgcctagaatacaacgcgatgattcggtaagcgtcattcgtgtagacacgactctcctcatcgtacatactccttgttctccttggccgctcttcgagccagattggtctgatgcttctttccctgggtatgtgcgaggtatgaacctgtgtaaggcgtgaagaacgcatcagctcatgcttgcgtgccaatgactttgcctgcgaaaagtttgtccctactcaccctcattggtatgcagcgtgagacataatcgacattcgagcgttcccaaatgcgttcgaaggatgtaggggtccttggcgagatcgatcgtctcgagtgcgagctttcggagtcgttctcttcgatccacgttcgtctcggatgctccagctgggtataggcaagggagggtagggcgaggcggacgtatgtgcgattagcgttgcttcttgaacaaggcgtgatcactccgatgcgtaccgacaccaccacctccgtgcctgcttccgattcggttctgaggaacacaaaagacccaggtaatcagctatgggtcttcctccacagataggtattgcgagtcggctcagactgatcgatgcactcacttgcatatcataagctaggtggtataggacgcacacattatcagcctcctgtcgcggcgatcgatgtgggacgtgcacctacacatattggcgagtcctgtcctgctgtatcagatcaggcagcgattgaatttggctcttgcagatgacgagtgatgactgtggatcaagctactactattactaaagctaccatcgactttgaccaacaccatgctgatcatcgtagctagacctggtcagtcggcttcgggcaatcgctccgacacggacatcgtataaatgggcaatgtccgcgtcgtcttcttgcacgcgtttcatcacttccactgttgttattgctatggcaaatgcgtgcccattccgcttggccgtcaaatgacctagaagcgataatcatggtggtcaggtgattatcatacacgactgaatacatcttgctttcgtgaagcagattgattcgttgtcggatgacaccataatctcgctagcgggaattgacgggtcgcaaatcgagcggagcagaaccaggcgatcgtgcaccgccttgccagtctggcagtgaaggaggaccagatataaacgaccacagatatgataaatgatatggcttacacagtgacaaatctagtcctcgtttgaacatagtgatgcggtaccataagaggactgtctagagcagtgtcgatacttgtgtatcccgagggagatgatttggttcagcgcgttctagcaagatcttctggtcaggtcacgtgatatttcggttccagcgagatgacgaaggaaacgaaccctaggcggacctacatcgtctcttctagatcacaaccatcttgcgtcttgtctcatcctcttttcttcaactagatcgatctgtttgataccctctaacgaactcaacgaatacacctcgatcaaaatggctgtcactcatcccgaaatcgtttacgctcagcgatcgtccgagagcgttcccgagaagaacatcatctaccttaccatcagcgcctctgacattcagggagagcccaagcttgacatcgagaccaacaagatcgtcttccaggccaaggctggcgagtgagtgtacacttttactgttaccagggggtcaggttggattactgatgggaacgttgtatacacagctcgagcaagggaatccccgagaaggagtactctttcgacatcgagctctttgacgagatcatccccgaggtgcgtcaccatcctttcatccacaattccatcctgttttattgatctttcgccatgttgttaccgcatgcaacatccgtaggagaccaagaagtcggtcacctcgcgagccatcgtcttgatcctccgaaagaaggccgcccgtgccgagtactggccccgtcttaccaaggagaaggtcaggaaccaatggatcaagaccgactttagcaagtgggtcgacgaggatgagcaggacgaggtccccgctatcgacgagtgagtggacagtctctgcacggcgtggccaaggtggaggagaggctgacattgacccatcctgataggtccgagtttggcggtatgggtggtggtatgcctcctggtggaatgggaggtatgccccctggtatgggaggcatgggaggtatgcctggcatgggtggcatgggtggcatgcctggtatgggaggcggtggcatgcccggcggtatggacagtgagtattcgacgagtgtgaccctgcgcgggttggcaaaaagtcgagtattgaccacacttccttcatacccatccagtggccagcttgatggctagcatgggtggtgctggcggtgccggtggcgctgatggtgccggtggcagtacgtcttccgtcaaataaccagaccgtattctgggctcgctgacgatgagacgacattgcgctatgatagtggactttgagaagctcatggctcagatgggtcagggcggtggtcccggtggcgactttggcgaggacgaggactcggatgatggtgacgatgtcggcaaggacgaggtgagtgcaagatgcggccctcttctgttatgttgcgatctggtttgtgctgaacagatccgcctcccgtcatagatgccctctttggagaaggctgacaagtagatgcagtcgccatgaatatctaataaggataggcacatgactcgaggggtcttgcaattgtgtaactctatcaccgagtgcccatgtagactcagcatcgtgaaaaaatgatacaacacgattgcctatgtggtcactgccaagatagcgtcaaatccgacaatggacgatgtaccaatccgctaacgacgttttcgccaccaaaacatttccctttcgttgccgcaacataccttttcagtcctctcgagtagtacgcttttcgcgctttttcattttggaaaagaccgtcctgtccaatcgatgtctgcatggtatcgccgcgctcttcggcgcctagctagttgaaaactctcttcccccagtagtaaattcttggacgtcagggaaaaggtcatttcaactccactcccgaagatgacattcaacctgactaaaacgcttatcctcataccctagagcatttgctttcgccgatagacgattcgccccctcatgcgatcttccatcgggtcacagaggtgtacaaaacgagtgtttccaaataattaccggcaagccacagcatcaagatttgtcttattttccttatgcacggtctgtatgctcgggttgtctcggcgtccgaaggagaacgtcgtaggttgtcccgccggatctcgccgagcgtgacgtcagcatattccttgcgacgtagacaatctcctgacgtcgtcgaaaataggtttttgagccagtgtaacaaaagtagctactgttgcagaccaggtacgatatctacgttcatagctacctcagacatcatacaggcctacaattccattgttgtcgcccggcatgagttcctacatccttgccataaactgcggctcttcttcgatcaagtcgaagctattcttgatccctgaaaccaagaatgatcctttgaaagcggtcgccgacgtgaccgtcaagaacatcggcagtaagggtgacaaggtgaaattcaagatctcttgggaagagagtatagatgttggcaagcttggagacgatctggaagaagacggagaagctggggacgctgtcgaatgcaagtcaccccaagcagacactgatctgtatcgctcttgatctaactcgtacgatcccaacagacaagaagctacctccgcagcttttggaaaagctgattaaatcttcaagcaagctcgaaaagagccagatcaaagcgataggtcatcgtgtgtgagtgagataattcaggctcgacgccggaaaatgcgtgactgaaagcggaacatttcagcgttcatggaggtccgacggagagaccgattactgtcaccaaggaacacgaagagggtttggaacgcatggacaagttgagcgagtttgctcctttgcatgtacgtagccgtgatacctatcgtctattggacaaagtcgagactgacacggtcgactttgcatagaaccactcggcggtcctggcgatccgaggtaggacagcttgttcctctggtcctttcatgactccttctcctgaccatctatcccttcttcagcttgcttgtcagcgcttccggatcatacctcggtactgctgttcgacaccctgttccaccagactctgccgaaggaagtctactcctatgcaatcccccctcaggaatcgggagctctcaaccgctccattcccctgcgcaaggtgagcagcgatgctagtacgaactgttcgaagtacaatccgcttagcctagatctttacggcagtatggtttccacggcttgtcttacatgtcgatcttgggcgcgatggccaagaagctgaacaaaaaggaagaagatgtcagcatcgtcgtcgctcatttgggcagcggcggcagtagctgttgcatcaggaagggcaagagcattgatacgagtgagtcttgatgccttcgtgtcgtacaggctgctgatcggacaattgacctcttttaggcatgggcttgacacccctggagggtcttgtcgggggtactcgatcaggatcgatcgaccccaccttgatcttccacctcgtacccggtgctgccgaagatgccggtctggaaggcatcaaggtcagccgagcagaggcgactctgaacaagtgagttgtcgtccggttcgtcagggatcatcagtgcctccaagctgattgcccttgtgctcgtaggaaatccggattgcaggctgtggcgggtacggccaactttggtaccatcaccacgcgaatgacggacaagtcttcctgctcggacgaagaccacgcctcgtccaccttggcgtacgagctctacgtcgaccggctcatgttctacctcaccgggtacctttcgaaactcttgggatccctcgacgcgtccgccgtggacgggatcgtgtttagcggcgggatcggggaaaagagcgatcatttgcgagcagacgtcgctcgtcgtttggagtggatgggggtagccgtcgacgatggcaagaacacccaggcgagcaaaggggaagaggtcgtcaacgcggtccacgccgaggggtccaaggtgggactatacgtcgtgcagacggacgaggaggaagtctgcgcgaggatgacgagggaagaattagatctgtagccggccgattggaaagggggtaccgcgggctggaaacgatgcagtgaatgtcaggggatgacgacattatttcttgatctggtcatgatgcaaacatatagaaacgattagacagtaaagcgagcgatccagagcttcgatacaagtgaggaagagggtgcggatcgtggaggggaattgggtagaccgatgatcgatggcgaggaagcgcagacgagtcccgtaagagagtcgggtgtcatggacgagtctgcgggaagagagacacgggggcaagagaggtccgtctaacatgaacaacctccgtatccctgttggttctcggcgtcgatcttgatcgggtccgggtagtcggcatacctagaaggaacgacgcgggtggatgcacgtcagtctttgttcgacctcgatcgatggacgagggccgagccgacgggactcacagttcgacctcggcctcctgctgcagggcattcttggcgatcgtctggaacgcctgttcgacattgatcgcctccttggccgacgtctcaaagtaaggaatgttgcccttggattgacaccacgtcatggcccgtttctgggagaccatgcgtttcgagtcttccatgtcgatcttgttcccgaggaggacaaaggggaagttttccgggtcatgcgggctggcctgtacagagggacgggtcgggtcggtccgggggacgatttatcagctggacggttcgaccgatcgagaaacgcatatggcccccgggggaccattcacctggatcaagaactcgtccctccatccatccaactgctcgaaactcttgctcgaattgacgtcgtataccaagacgcaacaatcggctcctcggtagaaagcgaccccgagggattggaaacgttcttgaccggccgtgtcccagagttgcatggtgacgacgcgatcgtccacgacgagttcccgggtgagaaagtcggcgcctgatggtggtgacgtgcgcgagggggttcagatgaggggcaggcgggttcatggtcgcacgcggtcgatagcgaatcgatggatggaagtggtggtatcacgatgtatagcaataagatcagtgtactgaggttgtgtttccgcaactcgagaaaagactgaccgatggtggccttgtactggttggagaatcgcttgttgacatactggttcatcaacgacgtctttccgaccctgaccgtggtgtgtcacaaacgatagcggagcgagcgggcgagagaggtcggcattgagtcagcttgaacgtctatagatttttactgaaggtgttcgtaactcaccctgaatctccaaggatgatgacctgaccgagaaatgccgcggggtgcgccatagatcagctcggggtgacgaatggacgcaacgaggtacccgtgaccactcaccttgagcaggaccttctttctggtagccatggttctattgacgagatgatgatgtggtagtcagtcgtttgcgaagagtgatgatagcctgttgatcaaggtgaatctgagctggtcgaccaaagtgatcatatcatccatgataccatgatccatgatgcatcatcgcgacaaggggggggggacggtggtggggcatacgagatgagcgctagtctcgtgggctcggagatgtgtataagagcccgacgcggtgccatcatttcggcgcggctgtgcacacaaataccaccacccctgcccatcgtgaaagaatggatttcgcctcgatcatacccaaacatccatcatcttttctgatctctcatcggaccaccacttctactttaccatcgacggattattaccaccgacgtccctaatagtttctactcgccaactctactactcgacgtttctctgtcgccttctgctccgaccgaatcgcgtcacacaacaacatcaactcctaaacacgtacacaacacgacaaaggagaaccgaccttttcctctcttggtattcgactcctgaacgatcatcctacggacccctttcaaaccaccagacattactagtttataggtttcaccggcaacttgctcgatctcgtcacgaacacgcaaaaccaataatctttgatcgaccgcgggctgccatcagaccggatcaaggacaaaaagaatcaggatcgtttttacttttccttttacaagaccaacaaacccactctcgttaggatcccccgttcgccatgtcgcccaggacgaccacttttctcctctccgccctcgtagcggcttccaacttgttcggtaaccaggtcaacgcccaagtcatcagtcaggcaacgtccgctggtcaggctgccatcacggccaccagcctcttgccctcgtcccagtcggtagccacgcccgttgtcgctacgccgactgctacggtcaacactgcgggcttgcccgcttcggctttggctaccaacttgcccgatggttacagcgtcccgtgagttcgagtcgcggtatttgatgtcggacctcgaaaaccaccccggacccgatcactgatgcacacgattcgcgctcggacctctcagtgacctcgcgtcgattacggccaacatgcctcccgccacgaccgtgccccttgacacgacctactctgctggtgcctcgcctaccggtgtggccggtgctccccccatcccgacttcgttccccgttgtcgccgagttccccccactcgacgccaagccgcccaccgactcagctcaggtccagcagtggttgagcgagctcgacctcagcgacgtgcccgattacggtcagaccaccggagctgtgagtgttggctttgtacgagggtcgtccaagttctggtcgctaacgtcccgtcgattctctttcgcagtgttacaactcgcccgaggcggctgctcagaaggaacgttgttggtggacttgcggtggatgcagtgagtgacaacgatgaacagggacagcagtactggaatgttgatataaaactcgcgtcctcagcccgatccactgatatcaccgtctgccctgacaagctcgactggggtttgagttacgacgatggtccttcgccttacactcccttgttgctcgactaccgtgagtcacatgcgaaagtggacacgatcaaggagccgcggctaatcgccttgtttatgaccatgcagtcaacgccaacgacctgaagaccaccttctttgtcgtcggttcgcgagtcttgtcccgacccgaaatggtcatctccgaatacatgtccggtcaccagatctctgttcacacctggtcccacccttacttgaccaacctcaccaatgccgagatcgtcgccgagctcggttggacgatgaaggtcatcaaggacacgatcggtgtgactccccgtactttcaggcctccttacggtgacattgacgaccgtgtccgagccgtcgctgccaagatgggtctgacccccatcatctggaccactggaaacggcgtcatctttgacactgacgactggaacattcccggaggccgagccaacggtgctacctcgttggccaggttcaacaccatcttggagactgccgaacagctcgacactggattcatcgtcttgcagcacgacttgtaccagtcgaccgttgatctcgccgtcggatacgtcttgcccatggctttgaaccagtcgagcccgtacaccttgaagtcgctctcgcagtgtctcggatgggacgagtctgagtcttacatcgagacctcgagtaacgataccgtcattgccgaccctgccgcgcagtccggtggcacttcattccccgtcgcctacaacactggtagcgccgctagtccctcggccaccggtgggtcttctgctactacgaccgcagcgggtggatccgctgcttcgggccagtccaccaaccccgctgccacctcctctgccggaactgccaacaacaacaacgccgctgccagggccgctggattcgctcctggatacactggcgctgctgctcttgctgccgtcgctctcggtgccattttcgtcctctaaacggatggcccgtgagactgaagtttggaaggaatgagagatacagacgggtggatggacgatacgcccgcgaggctgtcgtcaacaacataaatatatacccctttgctgtcatctgcctgcggattggtgacgagcgatagtgctttctgatgtactgcttagtgcttcacgatggacattctagaaaactttcactttaccaacaagcttgagagacctctctgtagggcggcggccgtcgcgaagacttagtattgctacgattggtggcctcagaaatgaaacagagtacatcgtctgtgagtggccagatcacagcacggatttcctccttgtgctttgtcaaattcgatgtgcatgcactatacattgaatcccacagatcaaagccaacgaccaacgacaggataggtcaccacgacaaacagttgcttttcatgccctggtttggtactcaggccgcgtcaaccgcaagtactctaaaagcccccgctgcctcttcctcctctccctccgcctgtgcctcgaggtctgcctctcctccttttggctcctgctcgtgtaggtggcggggtcggctcggcttgttctggtttcgtagcagtggttgtgttgacatcaggcaagatcggctggctggcgaaagtctctccttccccgagcgcctggagggaattcatcacaatggaccgggctatatcgggatgaattgttagatattgttcaattgaaggtttcgccgctttaggatcgaaatcactccattcctttggatagctcctgatggtagtgtcagtcgacgacgaaaccacgtggaggggcagctttgtcgattggctggtaaggttagaagcagatgcgttactcccgaactcgctcaagaccctctcggcgattttgagcacatctgcagacgtcaggacagcgcttgttggtgggctgatagacatctggcgaagtgagtacaattcggtaaaattgcccacgtagcgtaattgtaatcgaacttcgagcctcacggagacacacgtgctcattaatatatatatttgtttttcgctccaagcagaacgagccgtcatcgcagtctagcgcttctcggtcggcttcctcttaactcgtgccagtcgccacggcccggtctatctcggactccagttgacgagcccctgattcagcaagtagcaagtacgctcctggggtcagatgacgccttcaagaggcaggatagcttagctttggggatcgatatatcgatctggtgagaacgagagacgaaaggaagccgcgctactcacgctctagaaggggtccatcacgaacatgagaggaagatgacggtatttctgcaatacgatcggatctgataatgctatggttaaatacaggactgtctccgaacggtatcgatgtgactgatcgtagatcatcaagagagctaagtccgtttactggtacactggcctttttgccatcagagtgatggatgctatggccgataacgcgattcagatctgaaaaaaaagccctgtggcgccggtcgcgcgatcgcccgtcaaaactgcgatagaacgcctggaggtcgctaccttcaacaagctcaggagcaagagaggtttccaagagatcactggtgagagcgcgcgtccgttgtctctctgcgcaaaccgatcaaaccacaaaattcgcttcagactttctccctgctaacagagaagaaacgtcatttcggacataatatgctttgctcaatcgctcgatggctccgagtcgcaccagccggtgaacatagtaggactaggagtaacatacaattgtatcacaaactcacgatacgccgaacatttcgacgattcgtcgtgcatatcgatttcagaccttcctgctcatgttttggtccggccccaattaaacttaaggtaatcagagtagacacaacgcgaccttaagacacaatggccacagggatgttcaccattgcatatccggtttccgtttcggcatgccgagcacttgtcgcgcaccagctgccacttttcgcagaatgactgtccgtcgtggtggccgcaagtacctttcttgtggcatccctttttgcccatgtaacaatgtccgcaccgtagtccggtttttttggtacgcttcgtaccggtctgcttggctaactttccgggggaattgagagatttgacagtgtcgctcgaggtgactgatgagcaaatagcggctggtttatttgaactgacgtccatctccttagaaccgggatagtaagacttttcttcggatgatgggtaggaaagactctcaactggcctcttattcatgtcctgctccagtgacgaaccgaaacctgcgcttgacaactggccttcgtcgtgcccagcagcccaggacgaccacgattcgttgcacccaacttcctgctccataccgcccgtgtaagagtgcactggagattccattgatagcatgctgttacagttagcccctggtcgaagtgcccatgaatacgatgtcgaatccatgctgcccactagtgatgttgttggcagggctgtttcctctcttctgtatgaccacgtagccctcgaagatgtgccactgactccagtccgaatatagtctggcccccctgcaaggtatatatactgctacatgtgcatagccgtagtagaaccatgaatttcgtgctcgagtatacctccatcctttcatatgatccccaggctcgtcagctcgattttgtttcatcacgtcgatcgcgtgatctcagatcgcttcaacagaatcacgcgatccggacaagacggaatttatgatgaacctccctggagatcatgtgaagcacgtgagagacgctcgaaccaaaagtgtcgtctgagctagtcatacgcatgtcgccatccccaacgacgaccagtttcctcccttactgatgtatcgatgtcgctggtaaggttttggattttcaatctattctagtcatgcagtaaattttacatcgtatagtcttatcacatgatttccttctaatacgctctttgatctcctattccagtaatgcggtcataactcttccagtccatcgtgctcagagacgtcgcgttgatcctttgcagtcgggtattcgcaaactttatctcccttgctgcatttactgcagggttgatctccatcgcacttgctcttcacctgacggcaatttgaacaagcgacagccttaggcttgtagggctgttttctcttcccgcagtaaatcatgatgattttctctgtatttccaccccaacaatcggtccttctcgttgcatggcacgcatcgcaatttctccttctgttcttgtccttgacgagatctctggttcgagcctttccagcggacaccaactctgattcacgtgtctcaccagtatccgtatgctctaactgccacgatgaccactcgctgggctcgtacacattcccttctcgaaccatagtctcggtcccccccaatgagtccagagtcctatcagcttcgaactgctccagcagtgctctagcttgttcaagctcgtcgctggcatatcgtgaaacaaaacccccttctgtgtcttttcctgagttctcttctggattcaatgacggatcgatcgaatcgcaatggattccgaaaagaggctcgtcggtgatcgattcggccataataggtagtgctgcttaagtgctgtgggaaattacgatttacttattcggagggtcagtgtagtcgtttgtataagctgcgagtctctcgatcgatctgggggctttcccctgcatctggtcttcataagcgtccaggaggcgctacaccattaccctgttaggcctaatcctattggcaggtactacctgtgagagacagacatcctttcaatctgtaatccaataactacattgcgtataacgcaacgtgtctgtggcggcagtttgggggcggagcgttaaagtgaatcttgcaacatatcaaactcaatcaacagggtttgtgtgcaggggggaattgcagcttgattgaacgtcgtcgagaggaatcgatggagttcataggtttctgaagtctgtcagcgttagtgacacacagcaatactctggtcggtgaacgagatttctttcgatagatcgatctttctcggtactcatgcgtttttagtcgtttaaaaattccggcagtctggctctccttcacagtccgcatggatcttgaaaaagcgcacggagctgatcccccttttttaggggttctgggcttctccttgactcgagcaaagcaatatcgattcttctcaggcgcaacgaacacaatgtgataaggctttgtcgcagcacaagtttgcgtcggcgcatcttcgacaatttttgggtctccgctcagcagccccgttatcaaaatctgctccgctggtcgctggatttggcatctcactctcattctcatctagcgaggcatttgtcgagattgcgattctcaacgccatcgtttcccacttcgatgaaccgttaaacgtgttcccctctatcgcgttcactacacacgttgcctgaccatctttgccaccgagcgtgttggatgattcaccaggtactaaatccaagaaggatggattgatacaattcggaagggtacgcaagggaggagcatatcacatcagcctggtccgacgcaagcagaatgaaagtgaattatcgtgtgagtgagatggagacgggagacgagagcacgaatatgttatctaaccaatcgattgacccatttccttgatcgcttgagagacaagtacgagcattttaagtctcggagctggaagtctccaaatggcatcagggtcgcgcttgtcaaactttctcagagtaccagattgttttcgcccttctccaggcctccgagtcagcagcgaggcttgtttgcgacgcctttgtatagatataagcgctacatattgtttctgcgagaaggagacgtgtctcatcgtaacagtgtgacgtcctttcatcgcttttctgagagatccggcaagcataaactcatttgatagtgtgatcacggacgcgatggcggtctcgcgggacaggcgcgaaagatgtcgatggcgtttacatcatcgatgacgagatgcaacgatctaggcaacgcaatcaggccgtcatccgaggagtacttattgttacattttgctccaaaccgagaattctcgacgagtatgcgagtacgcaagaagaccgatgagacttcatgctttcatgtctagttcacctactccccacaagtgccgtcaaagtcgcgttccgattcatcttttacgtccacaccatgtgcgttcggttctcctcatgcgccttcgactctcccctcgtcctaaatctcgttgagaatcgattgcctatattcgggactagacccgttgcgttttgctccccaccactttcactagattccgtttatcgattcccgagtgcaacggatatgtggggctcagacgttcgctcattccctttactgatcgctccgtaagtccgagtagctcgctgtcggtccgcatactcggtccctcagcctgaacaaagtatacatttccgcctcccaggattcactggattccgtcgtccctctctaacgtcacatgacgctgctaagaccgtaaataccagtgtctatcagggataatccgtcgactctcgagctaatgatcatatggctcgctggcaacatataccaacacgaaaccagctcgcaaggcttttaagcattccatctgcatcggcatgctcaaacgcaaatgggcttctcagtgatatccgagacgacttggacagtcgctcctacagagatgttggaatcaagctgaacccgagatggtgatccatgctacgcgggccctgtccgttacgatacccagatcgcggtttctacgcaacgtacatgggaacagccctctctggtcagcgggaggagcaatttccacacaggttcattgtaacatcgctacgcttcgttctgtcggggccgtccgaagaacagctccagatggttcccgtctcgccgtcggaattgatcatcagaaacgagtcttcctgccattctgggtgtctagacatttcgcaggatctgcacggaagcgggcttttgtccttagtggatgggacctccaggccacgtcccgatggagcttcgtcagaagtagcagagacggtatcaagattgtgccctctagattcgacagcctggctatatctcaaaccacagtttcggtctgcctgccctttttttttcacgacaagaggggtaccgtgaagtcttgtcaatgaagccctcatgggatatgactcttgtgtccgtttcccctccgttttttctggatatgcatttgatcttccgacgagcgcatgcgttacaggcctgcagcccgataggtactaaacagctcagacgcatcttatgacatctcttgcatgacctgtcgttggccccagcgttgcctatagatgtatcaagtacttgtacggaagggtcgcaagctacgttggagggcagaaacatcgcaattcatcaggttgtgctgagaagacgacagggtaggctgcagcaataaggtggaataagacgaatgaaaggtcttgaccagcacctgtcagatccctcgtggcggtacattattaatagaacgcggcgcaacacgaaacactggtgatgagcggagacaagggcaaggaggtgaaaggaagcggcggcagaaagtccactttgactccagggcgagcctcgtagccgtagcaaccatgcgtcgctttatacgcgagtctgattgctgtgcattataaggtaaacatacatctgatgtgagaggattcaaaacccaagtcacgtgctaaggtccgcccggatcatcccctcccggacctctcgagattggtctgacggcgaggcttcctccatattcttcaagatttatccgactcgagctcctcgacagcgatgacaaggctttcgagctcagcaggtggccggtagcttctgttgaaccgaatgcgctgcctggcggatcattccatccggttgtcgacgatggatctccgtgagacgtggtcatgggaaggggagatgtgcgcttattacgcaatccgctgggcgaagatttcgcgctcaatgaacggctcccatcgttcatcaactgcagggccgatttagacggtgtcgacctggatgctagttcgtgcttgtccgagaacccgttggccaatgtcggtgtcgattcgccgagtgcagggacgaagaatgactcgtgttttggcgatccaggtagcgacatgctggtcgacgtactgtagacctcggatcgttcgggcatctcgatgtgcccgacgtgtggggacgacgattgccggttccacgtcggtcgcacggccttttcgcgcttgttggtatgcgtcaccttagccaccaaggtagataatttatggacgtagggtttcagcctagacgtccctgaccaaagcgtctttgggctagagggtaagagaccctcttccaccaggaccgttgattgcgagcgcctcctcatccaatcccgcacctcgcctgcatccgaccgcttccgccgtttgtagagactcccctttgttaaccagaatctgcgcctcagtaccgcataggccaatccgacgaggatcaaagcgatggtaaagaacacccaaaagacgtctagacctaattcgtccatcttgctctccagcttgggtaatccaagggcgtgatgaactttcccacgtccgactgtccatgcctgactccaccttgaatgcgtgcctacgggctgagcgacgtgaccgtgcggttttaccgctttgctcgcctcgatgaccatctttcccaaggtccaactgactgccgtctccccgatcgtgtcgacgctctggaaatgcgaattcttcttcgagaccagtcccttttccttggcccgccgagcggcctcgtcgaccagttcaccccccttttctcccgttagcgtctggtcgccctgagcgtcggtgattctaggtatcccgatcccgtcgtgcaagacgtttgatatccaggctcccttgaaacactgcatttctagtcgagaaatgtcgacctgtcgtccatggcgatgaagacgtagcgggtcagcgacacttctcattcccccctcgatcgacctatgccgacccgtgactcacggcggtcccttccaacccatgctccgcctgaaacccatccttgatatccgcccaattccgctgacagaacccctccatcccgcgctcccactctgcccagtcccatacccctccgagcccgaggatctgttgtgcggtataccagtactcgctgatcccgatgaacccacgttgatcctccctctcaaagtcgatgtgcggtgtgggtagaccggcgaacaagcagtgcgaagccggaggtggacaaggcgcgctcgtatccaatagtggttgtagcgattcgagacactgcgagaaagatcccgtgccgataaacgctggagtggatggcgaggtgggtggtaatttcaatcctttcggtaaacaaggatcctcgatcggttgaaacaagcttgccgagatggacgtggggagcgtatcccctgtctgcttgatcgtcttggacaacctctcgttctccttttgccattgcaagactttggcgccaatatatctctccctgacctggttcgtcccgaaccccaaccaggacgctacgaacaagggccactcgaccgcctgtcccgagagcaaacgcagggagacgctcttcaaatcatctgccgggaaattggacctttcaagttctccgaccgagggcgagaatgcgatctgggtggaagcgcctcccatgtcgaggaacccaaacgtagggtgatgatgattgacgtcgaccaaagtgggcgagacgcccttttccaagctcccctgcgtctccctttcgagctcggggagtggcaagatggcgtgttcctcgtccggatcttgaggggccgagtgtccgaagccgtccatgaggtaattgacggcgacccaaccccacatcccttcttcttccccagaggctaccctcacgctatccccacacggtccgaggtcgctaggccgaccgacggcaaagggccagtctttgcgcaaggtcgcacacgtagccgcgaggataccatcgcgcgtgtcttgttcgaggagacgcataccggccgtcgcgaggatgtagatcggggtgttgcgatgctgggaaggggggatatgttccatagcgtgggtgagcaagggagagaggtattgaggtatgttcccgggggacatcgaggagatacctatgagccgaggagaagggaaatagtcgacaggggtctagctttagtgacgaggtggaggacgatacaggcatggcgaccgtgctgagctgcactcacctggctcggcctttttcatccaatcatcccccgaagcgcccttttccaccttgacgagcctcctcaaactcctctccatctccctctcgatcctcttttccatctcggcaggagagacatccttcttatcgccctgcccgtgcttgttgttcttgtacttgcgtcggatagaactgacaatctcgttgcgctcggcttcggggtcctggtacgagtagatgatcaacctcgaacccgacgagccagcgtcgacgatgatggtatatcgggtggaagatagggttccaacaggaggaggcattgtcgtaggtcgtgtggttgcaacaagagaggagagccaagctgatccgagacgagacgaacggcgggtcctcgggaggttgaggttgggtgggggtacggcggatgtttaggtcctctgaaatcgcccgcagagatcccgttgcacggtgctcctgatcagttcatattggagtcctgtatattattcactggatgtgtttggtattgagtggtcgtcgttgataggcatagcagtaataatgtagtcatagtagtattcaccttgaatgtgagttgttaggtggtcgcaactcgatttgagctgagactcgaaggaaaccacaacaagttgatatgagtaacttactagctgtggtcatatgaatgatcatgacatcgtactcatcaaacatttaaccgcgataaccgggaaagctactcaacaccagccacgaacaggatgagatacgcagtatttgttaccggtatgtacactctcgctctgcgaacagtctctccaaactctacatcatcgacatgacctcgcggaaacctccacttttaaactcgacgtctgacatcctgactttctaccccaccctcgacccctcttacaggtcctgccggagcgggcaagtcgactttctgctcggctctcatctcgcacgcccagaccatgaaacgcaccatccattatgtcaacctcgacccggccgcgacgaatttcgattacgagcctgcggtggatatcaaggacctcatcaacctggaagatgtcatggaggagctagagtttgggccgaacggcgggttggtatattgtttcgagtgagtgcacgaacgacggaaaggggtgccgaacagggcaggacagaattgaatggcgaaaactgaacgcggggtgcgcattcgacgatggccaacgtaggtacctgttgaacaacctcgactggctggatgaacagctaggttcattcgaggacgattacctcttgatcgactgcccaggtaagcacctcccacgaattactaaaagacacgaggcctaccgctacgacgtctgaccctccacatccacgcgcatcgtaggccagatcgaactatacacccacatccccctcctcccccgtctgctctcccacctacaatccggcaacctccaattcagagtggccgctgtctacctgctcgaatcccaattcgcccaggcggacaaggccaagttctttgccggggtgatgagcgcgatgagttgcatgttgtccttggggtgtggaatgttgtgcttgatgagcaagatggacctcatcaagggtcctgcggggggtacgggcaagggacctcaggggaggaaaaagattgggaaagagatcggaaggtaagtcttccgattcactcggagaaggcatgatttccttcccccctcgacgttccgcgagaagagagttgaggctgagaatggttcgagcgtccttagatacctggatacggacacgacgttgttgctggaagatgccaataggcagacaaatccccgatttcacgcgctgaatcaggccatcgtcaacctagtaagccttccttcccctttgcttcttccccagagcgtcgtatctctctgcgcacacatgctgacactctacaaccgacggatttatagatagaagaccattcgatcgtctctttcctcccactggatatcaccagcgaggacagcttgacggccgtactgagtcatatagaccacacgatgcagtacggggaagacgaggaaccgaaagcgccggaagatctggacggaggtgggtcatctcccggtctcggtcggtgcccgctcctagaggactgataatatgtctcgtatttgcaggcgatttcgagggaggtggagatgccgagtgatgagacgacgagacgagtcacaccggaggctacagcttttcggaaagaagtggcatcatcttggttgtatttgtagatgacgatgacgacgacacgacccaatttcatacttatatagttgcaagcaagctacaagatgctgcttttgaaagttctgatcacgtgatttatcggatttggccgatcgatcggacgaccgagccatcaaagtgatcaaacagggatggttatacgcatacgattctcgtaatcacccatgaacatcagcgattatagatctcctcaccatcaacccagagagatatttactaggccatcgtccacctctcgtaaggatcaagacttcaaattccggtgagtctcgattgcgcgagaatcagacgcaccgaatttctgatagaatggggctcttcatagctgaacgagacgtcgaggaagtctgattctttcgtcgtatctagaagctacctcgagcatgtcagaagactcccatgtggtcaggagccgaacgaggaggaaatcgcttccaagtggaaaggccgtcgaacgacaagtcccggtcagatgttcatctctcccgccgaccctgatatgttccgccagcatgccatcgatcacgccgcgggaacatgataaacttttgatcgggtcgatcgaagacaagctctcgcatcgccgggatacgagggaacgtgcacactcgtactctgcggctagacgacacgttggaggaagaaaggaccctcgactccgtcgatcatgctcggtgccgccaagtatcctcgctcagggtgaccagcaggaactgaccgtcgacaatcccggatcagccatcgtatatcgtcccaagtcactcattgctatggaaacctctgttgtcgaatctatgaggttcgaccacgccttgactcccgtggaaaaaatcacccatttggtaacgctcgatcatggcaacgaaagcccacctcaggaagccgcttgctcgacggctttttcagcgcatacgactatagtcgcgaaatcggaaattttcgacgaaatcccggtcgtatcgctcggcttcatcagatcgaacacacctccgacagacctatcgaccggtacggaggggagcccccagtgcgaccccacgatcgtttcggcttccactattcttcctcttcactcaatatccggtacagacggaacatctcaagaaaatattaccgcatctgctgatgatacccagagcccaagtgcattagatggagcggatcaagaacttgtcatttcgtcggcgttgcatttcatcccggaaaatctgatctcgccgctacttttgccatttccggcgaattttcacgatgatgaagccattcaaaacctagcaagagaggatgtcacatctttgacatcgaggacctcgtccgccgccaccgatgcgtgtgaaacgctccaggatttgccggtcatcctcgtcacgtcccccctggaaaccccgctgaccatcagtcctgaagtgatcaaagacctgcacgacgggaagacactagagatggagacacggaatacgtgcccggattctgcggtaacctcgggcggaaatcagaccgcctcattggaaggcacccccgaggaagggcgatccgacgaacttctccaaacgatagcaatcagccccatcgagatttgtcgggatcaggagctcatagacagcatctcgaagactctccctgactccgggtccgatttacctcgcattcccttatcgaaaccggtccagatcaacgtatgttcatcgcggcgaggccgagaagacagcttggctttgagatcccgcaaaaccctaagcgtaacttccggtcgtcagcgcgcgaactcgctccctagcctcaacatatcgcgtctagctctacctttacccattcaatcaattggaatcctagaaagccctgttcgaaattgcgattttgcgaacgccgttgatgtgccagcacggttggacttgagctgctcgacgagttcaatcgtcgattcgcgcccccgacctcgcggacgccagctcaaaaggaaaggctccgctcgaagcaagtctcaagagagtgcttatcctaggaaacggatcagaatcaaacgaacggtgtccttcaccgcgaatcagccggcgaacgtgcccacttcgatcgacgccatgaaacgagacgtcaggaatagcgggaccaaactcggtgctcaagaggcttcggtggtgacaacccctccgatagctaaacgtgcaacaagcgccgtgtctagtcccgagcttgcagccttcgacgacatcgggttcgaagaggcccaagccatgttgacaatcatgaaaagaagtggccgattcgaagaaatcgcctctgatatcgaaatcccccagacgccgagaaatcaagcttctgtcgggcctgatcctaccggggtgcccgtaagtaccgcgttcggacaactaggtgccgattctcacgtatgtatccgcccacttcagggtacctgtcctatcactccccctcgagaaaccatccgaagcgatcgcatgtccaaagcgcgtacgaccaccagcccttcatacagcgagatcagatcgaaaaagagaaaagccgaggtgagtttagtctcgttcatgtttgcccgcgtcctcgcactgacaccgtcgtgtgcaggacgcaaagagcactcgcactctcagaaaaccgttcaaaacacctctggtcccggggagagcgctgaaaaggtaccttgggagctcgagcccccctttcgttgccgatacagatcttctggataccccgccatcctcgagtatcgtcaccgggaatgcgagtcttctcgacaagaagccctttccgacatttgagtccgcacactcgaagcgatatgttacgaggcgtctagccaagcccttcaaatcgccatctttctccttaccgaccactgcttcagagcttccttcgagcgatgctatcgaccccccctccagccctacacatccgcctgctcgccgtactacagttttgacggcgccctccaccgaagctagcgtcgctccttcgagggcatccgagatcagcgctttggaagtcagaaaacaggttctgaaccaagcattgaagatcattcacaatcaagaggacgaagaacgtctgtcacagctgcacgagcaatggctcgctgcgggacgcgagattaccgaaaagttgtttagcgttgttcccgaaccgaccgaacagaaccccgggcatgccaatagcaattcgtattaccaagaagtatccattcctgtcccaagatcggaagaagccgagaacagagaaggagagagcgccgtcaacgggccaaaagtgacgaaggagtggaatatgggttctatgctcgatatgttcgggatcgatgcggcgttgtttggctggatcgaggaacaggaggactggaacttctaagcagggatactgcaaccagagtacggacgaaatgtatgtcatattattattattcacatcgcggaacacgatctgccagaaccaccctacatagacgatacatgggttgtttatccgaatctagatatacacgaatacactaattgtcctgtccgggagttctctgccgcgattcgagcggcgtattcgatacatgctacaggtgagaaccagagtcgatggtttttagccgagaggctgcagaggaagacggaggcgtatgcgatcggccatgccggtggtaggtcgggaaacgttgttgcttgatattgatgttagggtgttgctgcgacgatgatgatgatgatgatttgggatgagttgatgcgatcgttaatcaggcacgaagccaaaggatcggaccgtggcccatttgttctcgcgaggcactcaaatgccatgctcgtgcttgctcgacatggcagctttcctggcagccatcctttgcactgagaatttgaagcgcagggaggtcattagatcttccacctgcatgacgcgtgacaacctcatgtcagcatcacactcactaccgctctgcttggttccccgcctgtgttgatcgcgctcgagcttttcatgttgccatctcgcctcgaggtattgtcgtttctaccccggacgcgttgacgtcagccgatctgaaactcttgctctgcgatcacgatcgtcgactcacggtgtattcgaaaagagccaacgtgtactgatacacggggtgctcctcgtccacctcgtccccattgtcttcttcctgcaccgtatcctgtcctgcctcacgcaaagtctcgtcacttccctcttcatccccttcagccatgtcgacgggcttggattcggtctccgccgactttttcgtctgctttacgtcgtcatccaccggatcgtgctccgagtgtttcccgacatcgaggtcatcgaaagccttgtcgatcccggcaatctcgatggcatcgtcggtcgggtcttgaggtccaagctcatcgggaaggtcaaagctagcagaggtggccgaggagcccatggtagtcgaggaacatcgtgaagcctgacgagatcgacgttgctctggagaggtaggggaggaggagtcggattccatggctggtaaggaaaggcgatgacgagttgaccgaggagggcgagacgggaaagggtgctcgacaattaggtgccgactaccggctagattcgtagtacaggtcgacactggtgagggtactgataacgacgaagagctctagcctttcgtcccggtcgaaagttcctttgcgtttgaggtcgatggcgtcacgatctgctcgctcgaccgtgtctctctagcctgcctttggctcggttgccaactaaagaccttggctttgtctatcttgccttcaaagggattggatcaggaactcgacgagcgtgtatcgaaaactaggtggtggttgtggtggtcgagtaaatgtctatgtctatctcgtggcttaggtgtgggctccacacgtcgaggcaaccgaaagtaggttgatgacgcgatagtcacctagagtctggctcgaacgccgaatcaaagcagagtggtagctgacaagtcgacggatcttcggaataagatctcggatgtgctgaagatctcacacgaccagacgtcctgcttcacgactagtaagtggagtgagaatgtttgcgagacagcagaaagagagagaagaggcgttgcagggcaattgaatcgactttttcccgcacgacgggagaccaggcggcaagtctacagatctcgtccccgatgtagccccggctcagcggggagtcggtcgagccatgccccgagatgcaccgaaacgcaacgctgccctccgccgccgggaaatgtgacaacctgccaccctgccggcttggctaggtcgagggcgaggcgaggacgacgacgatgatgatgtttgatgagtggaatgaaagcgatcgagagagagagccatgacgcgcagtcccgggatcaaggccgaagcgggatcaacctggccagtcgtctgaccgggcgagcggctccctgcgcccgattcatcggggtatcgtccgaaacgagagtctttctctgttggaccgaaaaggccattgccacggatccgataatgacgaggggagggcgagcctaccctcttcacaggatctttaggctgaggaatcccctgtcatatgtctgagcgctttgaaaggactgggatgggaaggactaaaggttccctcgcggcggcttgtgatgggcggtatttatatgtaataaaaaacagataaacatcaagcttcttactcgtctatcggctaggatgcgcgcctctcattcatcttcatcagatcttgaacgcgcgagggcggggttcgactccccggtaggaaaatctttttcaggttggatctcatatttttgcggccgccttaccggccgtccttctcgcccatccagccttatctttcggacttgacgcgttaaccgacaaagccgttcttcccgatgaccgggcggacgttgaccgtcgtctcacatgggttatacgacggaaatgttcgagattttgcaatttcccggtatcgatcaaggcgagagaaactgcgatcgagtagcgagtagaggtgcagctgataagagccagagtacttatgtggtcgcttttccctgtcagagcaaagatcaaacgaaatcgcctaccgatctgcttcattcatctcggtggctgcatacaacattgattgcaatacccagtatttcatcttgccaacatgccttctgccgtccatcatgacgtcgtacctaccgccattcctctcaagatttctgaagatgggatgaacttaagctacgacgacccgaccgcttggaacgtgaccgccgcgcccgccgtcgtaagtccccgaccgacctgacggaccgttgcatgctctcactaattgtgcgaaccccgatgcaactcgcagtaccggtcaaagaacaagatcagatccgtcgtagccggtctcgacctcacccacacctcttccacgaaaccgctgatcaacctcggtctgggggacccgaccgtctttggattacacaccccttcagaggcctcgatcagtgcagtacaggaggcgttactttcggggtcggccaacggttatgtaccgggaactggggacaaggcggcttgcgcggcggtggcgaggtatcactcgaaatgggacaaggtcgagtaccaagctgaggacgtgactctcgtaagctcaatcaggccgactgattcaccaggcgtaactgacgaattgactgcgctctcgacctagtgtcacggtgcgactcacgccctggacatgtgtttctcggtcatgacctccccgggtcataacgttctcatcccgtcacctggtttccccgcctacgagaccttgttggggaacattgaaaactgcgagatccggacgtatgactgtctgcccgacaagggttgggagtgtgatgtcgagcagatggagagattgatcgatgacaagacttctttcatcctcgtcgtgagttggcatcgatacagggcgatgaggtatggcgataatggctgaataggacgctgcggacgctttcagaccaaccctagcaacccgtgtgggaacaacatgcggcccgagcatttgcggcagatcgtatccctagccgagcggaaaaaggttatgatccttgccgacgaagtgagcccctttttttgtcaaggaatttcgggatgaccatacttaaattgtcttgtctactagatctatggccatatgcagtggtcagaacacccatttgtccccctcgcgtccctctctgaagcggtgccggtcgtcaccctctctggtctatctaaacgattcctcctcccaggatggcggttcggctggatcgtcttacacgatgcatcaaaccatgcccatgccattcgacatgctcttcactgctggggtaacaggatcatgggcccctgcagtatcatccagaaagcccttccaaagatcctggacgagacgcctgattcgtggttcaaagaggttgtcgacaagctcgagaagaacgccgtcacgagttacgaccgtctgacacggatccccggactctactgcactttccccactgccgccatgtacctcttgctcgggatcgacattacgcatttcccagagtttcagtcggacgtcgacttttgctcggcattggtcaaggagcaggccctgttttgcattccgggacaatcgttcggaatcgacaatcacatgcgactcgtcatcgcggcgcccaacgccgtgctggtggacgcttgtgaaagactggaggagttctgtcgtaagcattatgcgtagacgctggacgacacgtagtagaacatcaactatatagacggtctgaaacaccactgtatcaccatgacctgagcattgtcattgcccttgcaagtgactggactcaaaaagaatgacaagatcgtcagccaggcccggtccaccacatacgacacaaagcggccttgaggctagttagcagtaaagcgtgatatcaagtggaaagaaaaagacaatgcgcacgtcgcaaaaaagaatttcctaccggggagtcgaaccccgccctcgcgcgttcgatgaacaatcgagttgttattgagaggcgcgcatcctagccgatagacgagtaagaattggatgctgaacagacgatcaagatgatttatatgatgttgactcgctgccttcagctttcagccggtgagctgacgtgcagtattgctagtctgtaccgaggcgattttgatgtcttgccctgttcatagtggtgccgacttgggcatcgctcacagcttcgtcttcatccgcgtaggtctgttcggctctgacgagtcattcagtgtgctcgacgacctccctcgtcagctcgatgagaagatagcccaaatcgctattagatcggtcatttggcattcaagacgatttggctcgtgcgtcaactgaacatatacacgatcctgttctgcgatatattttcgaaaacctgattactacagttttcgagcttcccaatccttacagcgaggctttctatgatctactttcgggtccaaaaatcttacgagcgctttacccgactttatcatgcgtctcttctttaccgtgtggcaggcgacctttgtgttcaaatcagtccatactgacgtacaactgccccctcctctcgcctttcctttacttgccctcgtcgaccaggaccttgaaatcgccgagactgttgacgatgtacgtcggtacggtggaagatttcttgggtccgagcaggtgatcctcgttcgtcacccctgtgcacatgaaatgacgccgccgcgtcagcctcgaacctccctcagctcgggccaagtcggtccctccttcactcgaactcaccggtcatggtcaacaacgtctcgatccccgaattctgtccgaacaggatgtcggtctcgaggttatccccgaccatcaacgtctttttcgggtcgaaatgtttcgacgcgaggatggcgtccatcatgtgcttgttcggtttcccgatcaccgtcggcgtcatcttggtcgagtagacgagcggggcggacatggcgcccgaacccgggtagaactctccgccagaggggaacgtggcgtcggtgttggtgaggataaagtgacagccggggttcttggtcaagtaagagtaggccttggagtactttttgtagtctttaggaacaagggtttcacagaggattagcaacgggatgggcagatcgacttgaggattccccgttcagactcactgacaaaggcgtcgaaaccgcacaagacggcaccgaccgacgggtccgctttgacggccgtgtaatccttggcaggcatgtactccatctcctctgggtcctgaccgtcatcatcccagatcggaaagttcagcttcggcctcggtcacttggactcccccccgcgtggacgggcacgctacgctacgctcgagatccagagacttaccgatcctccacagtgtgctacgcctacggcgtcgagctcctcttccaaccctttcatcccgatcacgtacacctttttgtccttggggaaattcaggatcttggcgaggtacagggcggaagcgaagcccgagttgaagagttcgtcctgggacccgatcgcacggcaaccttgtcagccgaagagactagactaagaagggggttttccgggatggaagagtgggaaacgcttcgagctggtactgacatcggtggtatcgattccaaagtcgtcgaacgtctttttgtacatgggtcgactcttgctcgcattgttcgagacgaacaggacgttcttgcctgcgaaaaggtcgaagatatgtgaaccgcgtcagtctcgcaagaactaggcaaagaatgacgatcccggcgctgttcacccacctttcgacctcaaccacgcaatgacctctttgacgcccggaatgagtttgggacccgaccagatgacgccgtcacagtcaaagagaaaggtgtcaaacttgtcgaccagcaaagcgtagtcctgggccgtcgtcagacgttgactctcggtagtatcagccatgacgtatatgattgcagatgaaatgtctcagtcaggtatagatttgacaatgatcaagagttaatcaggtatatggctcaggtctatgactctaggaggtcgctatcccctctaaagagtggaggtaccggtccgaaacgtaaacgcgggtcgaccgagttcaagggcgacgtgtatatgacaagcacgcaccgagggaggacacggacattgacatgtttatcgcctgccagctgccaattatgggttcaaaaaatcacctaatgtccgcttatttccttgtcaatttcccattttcgactccaaaagattcagacaccctcccgtcccccaagcgaccaccgggcgacgaggaagaggaaagaaaggacatcgtcacatctctgccatcctcgacctgacaccaacgacgaccagtcacctgctatcacttcaatctcgacaaggaaaaaagggcaagtcgacatagacatcgatccacgcagcgtcctcgatagtagaatcgcgaatatcgacctcgacatccaccaccctcaaaacggacccgaagcttaccaccggcacaccatcatcgcaaacatgttggttctcgccgagacctctgtcggtaagtctcacagacacccctcttgcatgcacctttctgttggacaccatcgctgacctctcttactcgctctgcgactcttcaggattctgtctgttcaagctgaacgatgatgccaagctcgagagcaaggacctatggaagtcgttcgagtcgcccgagttggccactgccgcgtgagtttgcatagcctcgtaatgtatcacagttctctatggttgaccctgccctacattgcgactcccagccttaacctcgaggctattcaccgatttcaatcgaccgcctcggccgtcgaagacatcaccgccatccaggacggccgtctctccgacaccttgaaaaactttctatccgaatccatcccttcgtcctcgtccactggcggcgaatcttcgaaaaagagcaagaaatccaagtcgtcgtcgtcgtccttggagcagaaacttatcgtctcggaccccaagttggcgggtacgatttccaaggcgttgagcatccccgtgcatagcgataccagctcgggtttgcaggacctttaccgagggatcaggacccagttgtcggccctcttgggtggagtgcaggagaccgaccttggaaccatgaggttgggtctcggacacagtttgtccaggtgagcatgcgttcgggcgcgtctgggtgggcgggacgagacgagatgatgagaggctgacgagatacacggctggtcctattgtgtaggttcaagttgaagttctcgaccgaccgagtcgacacgatggtcatccaggccatcgccctgctcgacgacctcgacaaggagatcaacatttacagtatgcgagtcaaggtgagtcgtcaggtgtggtctagatccccttcctttcaaacgcatgctgacgttccacgacactgaacccactcgcaggaatggtacggatggcatttccctgaaatgggcaagatcatcgccgacaacctcgcctacgccaagtgtgtcaaggcgatgggtttccgaacaaacgcctcgtccaccgatttcggactcatcctccccgaagagctcgaaaacacgctcaaggctgccgccgagatttcgatgggaacggaaatctccgactcggacattgatcacatcaactcgctctgcgaccaggtcatctcgatcaccgagtaccgcaaggaactctcgcaatacttgaccaacaggatggaagccatggcgcccaacttgacggccatcgtcggcgaactcgtcggtgcccgattgatcagccacgccggaagcttgaacaacctcgccaagttccccgccagtaccatccagatcttgggtgccgaaaaggccttgttccgagcgctcaagaccaagcacgatacccccaagtacggtctcatctaccacgcctcgttgatcggaggtgcccctcaaaagctcaagggaaagatggcccgtatggtcgcgaccaagacggcgctctcgatccgtgtcgacgccctcgccgacgccgagaccaagtcgaacccggccgccgccaggatcggctcggacaacagggaaaagctcgcctcgcgcctccgagcgttggagcgttcgttgggtctgccgcccacgtacatccgggccgaccgaagggaacaggccaagtacgatctcggtggagacaatgtcgccgcgtacaacgatgctgccgatgagcagttgatcaagactcagcctaccggtgaggatgtcgaccctcagcaggccgccatggagattgtcaaggaggtcaaggaggagaaggcggccgacaagaaggacaagaagaagaagaggtgagcgggggagaggggcgtggtcttttgtgcttgatggcgatgctgatccgagccgcgtacgtttgtcgtaggaaatccgaggctcccgttggtgacgtgaccatggaggtcgatggcgagggtgacattgagggagagaccaaggagcaaaagaaggcccgaaaagaggccaagaaacaggtgagcttccgcggtctttacgagcagagtcgtcctggtaaactcatccagtctcgcatccttcctcgtgacctccaggccaaggctctcgccaaggcatcgggtgacctttccacctcgaccgccgtccttcccgagactccggcagcaaacctgacaaacggagccgacgaggacaagaaggacaagaagagcaagaagagacgggcgagcgaggtcgacggtggagccgaggccaacggggacaaggaaaagaagaagaagaagaagagcaaggactgatcgcgtggagtatcccacgcatctttcttttcttgccctccccttttgcatattcgcctcgcctcctctttcttgccctgcaacactcactctgctggcaaggagggcgggttgttgtagcacgaacttttccctctcttcttgtttgttcttctcttcttgtcgagtcccgtcttgtacttttacggagctttttgcccagggaaaaaagactcatgccatcgatttccctgctcggatctatcgcgacgaggttcatgagtcgatgtaggaagtctgacgagatgctcatggaccggatcgtctacgccggcttttggcacgacccgatcgtgaggacacgcaaccggttcgtctggcatggtcaggcaggagctgggcaatggtccttctgcctggattccccgcggcagagacgagagaagagaacgctcgtgtggaatcgtccctggatgttttggtagctgtctctgatcgatcaaacgacctgcttcactcgactgaaacgcgaaaaaagcacacgcgagaccttttcggcccgagatgttgttgtcgactcttccctgttcatctcggtacttgactaccgcaaccagctccagaggaacgtttagctccctcatgatgtcgccttggacttgttgggccactgtccaagcaatcgccagccacctactgtgccgtaagctgccccgatcccaaaaagtccttgatctcagggtcaattccccatatcaaccggtcagccggttgattcctttctatcgagtggcaagtcagaagggagtccatagttgttgttgatgttgagggtgtgatgattaatcgaggtggaatgtgatgcaaaatattcggcccgaggaatcgaaaaaggagaaaggatggggtcggattcctttaatataagggcaaaatacataaaccaataacaagagggaagaggtcgatgtttgttcatatataatcaaaggacttctgttttcaaaatgatgtgtatgcctggtcgttcacaagatcataaaggacatgcagggcgaaatcgatcgatacaaggagatccatcacgacaccaacgctacccacgagctgctacccgaacctctacccacaattggttgattcgatacgacacctcctgcagaccatccactgtgatcatcacctctgtacctgcctaggccagtctcgcgatgcaacgaccggatcgttctctaccccccgcaccggcggaacacgccggcttcaactcgcactcacctaccgccccgacatcgacaatgacgacgacggcgacgacgaccactccgaccagcccggcgatgacggaccggggctggttctcctctttcaagatgatgggctcgaaacccgccatgtcacgtacctggacgaaaaagggaaaggaggagcccgtccctaccaggatgaagtcggggggtgaaaacagtaccttcggtggtgccagtgatggtcaagtcggaaccgggggacaacccgtggacaggtccgagtgagcccagaattcgacgcttgtccgtgtcgaatctcgacgacattagcctcgtggggagaaaagacggtctcgctgacctcggcaacgacccgtctcttcccctttgcacgcaccatgcacctttttgggcaactcccgaccttcgtctcagaggacgaacggggtcgaacccgggcgtcgtttctccactgggatcaccaaccgatgtccatcgcccgatgacggccagacttcggagcgtctacctgcctttcgaggtccctttggcatatcaacaggctgctgatcagtgcgagatgacgcctggacgtgtggtctagtcagggacagcggctgtggtgacggggatagcggatgagattcggttgatatcgagatgcgaggtgttgtgatccggaatgcatagttgtacattttattaatcgtttgtgtacttcggtcacaccatgacccgatcgatcggtcgctcggtcgtcggcttttgctccgcgaggtcgaggtcgagcggtaactagcatagctgtaccagataactgagtgacaccacaaggatgtggataactcgcatctcgcatcgatcgaccgcttatcgggttgatactggtctgaatgacgatcacatgaccacataccagcttgagctctaccgagtggctggctggttgttgacctgtgtagtcatccgatctgatctgatcccatctcaccctctcttcgccgcctctttcgagttttaatttagcgcgaaacgggaaagtaacaagagtagtagctcaagcagcaaagtagtagcttagtagtagatcgactcattccatagtacacacaccctgattcaacaggtaccaatgtgcatccttgacaaggccattcatctgctacacgatcgatagtagatatcgctgttgtcgtttgagataatcgcggggtagagattccgttccagaacgcaaacgtccacaaagagcgagaacatcaacaacaccggacccgtcgaatcgatatcttatccttggcattccgaccggcgctctgtgcgcatagacaatactctcaacaacatctctctctctctctctctctctctctctctctctctctctctcgtccaatcgctcgcacctactgctgtaatccagtctggttcacaaaagccaacagctagaaacagaaacgaccatcgcctggctcgccaacacgctacctggacttcgaaatgatgaacagacataggctctgagagtctcccctttcctcaccttccctggaacatcggtcgacgcttcctcgcagacttgagaggcggatatcttctcaagtgcaccgtttgttccttcctcgcatacgagatcatcctcatcacggatgacgaccatgcaccccttcgctcgtagtccgatccgggaaaagggctcgtcctcgcccgccttcttccccggcgggtttgaagacccatctcaacaggaagaaaggcgggaagaagaagaggatgccttgaggatgatggcttatggggaagggaccttgtcggcggatcttgcgccggaaagtagggggcttcggacaggcagaggggaaggcgaaggatctgggtcgggttatgggtcggggtcgggatccgggtcagggtcggggtcgggaccgaggtcgttcaagagagcgccgagatctccacctcctcagggaccgccacgtgagttcccggtcggcatattcgaacggtctcgatgtctctcctgggttgtactgatcaggccggacgacaatgttatagcgaccgagctacccccagtcccacccctcacgcaccgagcgagaaagtcgtccgtatcgtcgagccggacaacaagctccgtgggtcattcctcctcctactactcgacgacaccgacgatgcaacaacaagcctccccgcttatccctcgtgatcgacaatttggcggcacttccaccccccaggattcagccacagcccacttttcctcctcaccccacacgaccactccggccggtcgaccccccgcgccccctccacctgcgaggagaagccgcgtcccctcgaaagacctcttgcaatcggcactcgacctcgcggaaaaggccgtccagtgtgacaagtcgaacgacgtcctcggcgcactggccatgtaccgcgatgccgtaggcaggttgagatgcgtcatggaacgggtcggcatcgagttgggtccattacccctcggtctgggcttgccagagccgacagattcggaaagggaggatatcgcacaggcgaggaggaggagagaggccagtgggcatcggagtggcgaagagggcaagatcttgaagggcatcgtgagtctctggagcgctgtgtgtgtggagagagtgcgtatgaatcgatcgtccgtaacctcgatacgtattcgcagcacgatgcgtacatttctcggataggactcttggtggtcatggaacggggattgcaggatggtcagccgaacccggtcacgggcgaattgtcagagacgacgatggattcggacgagatgaccgcacggccatcggatcggtcttccgagactagcacggggcttacagggatcgggcggatggcgctcgaaacagaaggcgatcccattgacgacgtctcggacagacggcaaaagcgaaagagcttgaggtcgggggaacagctggtcgaagcgatcagcgggggcggctcgatagggtttcgaagagactcgctggatgccgacgtcaatgcgtattaccctccagcgatcaaggaaccccctgtacctcgaccccgcacgtcgtccaggaccgcggacgacgggtcgaccggtcaagctcgagcgagtggattagccgtctcgctcggccccgtcgtcggatcatcgcggcacgatcctgccaccgatcgtggcatgacaatacctagggcgtctccacacgtgtccaacacctcgatcactagcatgtccacgctcgggtcgcccagtagcaccagcaccgtcacctcggggtcaagctcgcaacgccattcggatcggcgtttacgtctccgtacagcccatcccaccctcgggctcgaggcggatgtctcggaccaggagcaagaagagattctcaaccgcacgccgtatgccgagggcttcccgagcttggagaatgggaccagccgctttgatcccgtgaggagctattcgaactcgtcgaccttgccagactcaagctcgtctcacagccgcaagtcctctcggaacggcgcctctgaacctccaagtatatcaccgcgatcggccagtttgcaggtcgatttcatgcaggacctacagtcctcgccgcccgaacgatcgggttcgacccgaggggtccagggacacaacaaggagaggtccatcgcgtcggtcatggaggaaggcgagacctcgtacgagatggtcgatcccaggagtctctcgacccggcggacgacgtcgttgctcaactctcgggccgcggtcactagcaatgcctactcgacgacgcatcgacacgcacccttcccttcccccggtctgactgattcgggatcatacgccgagtcttgtttccagcagctgacaccgcgaagccgagcagtctcgcagcctgctgcaggcaggagcgcaatccgagacacgttcgacgcctcggacgctccgccactaccaggatcaacaagaatcgcgcacgcttcgctcgatcagaccgggtccatgttaccaccaccgccacctccgaaagctctcaccatcgacaccagcggttcgactagcatgcaatacgccgcgtccgctgcatcggtgtcgactgctgcgttgatgatgtcggattctcccgacgtacaggaagtcgctttggattcgcctatgcttcgttctgttgatcagctcggacagggtccgtcacaaccatgttcggctacggaacctccgccggccaatcctatccatcggccctttcatgtattgcggctcttgcgacaaacgatcgtctcgccttcgggcggattccttagcggacgattacacataccaagagcgatatggagtcaggtgaccgtcaaactggtatcactcgacgtaaaggtccgggtgatagaggtgctcattctcagttcggcatccctatcgagacatggcgacgcgctcgtctctgatgacaccctggagtatgacatgggacacctcaagctgcagaggacccggacagacgtgccatcacgagccaaggattttatcaggacacttgacgagacggacgggctgttggatgagatggaaaagttgttgaacaagaagctagggcttaaagcctatacaagcagtgccaagggcaagaagatgtcgacggtgcgtcgcctcgcgagcacaatccaggtaggatcccagctcacacttaactatctaggtcggaatcagtgtactaggcagcaaattgaccaaaactttcgaccggatagctaccggtaaaaagttagtgtcggacgccgacgttgtgtctgctcgctttgaggctgacgacaagccttcgatacagtgtcgattcgcccacgtcatatatcgacagtttgagtcgactttgcattgaggcgcaagttataggcaagtacctcccgcttcgagcgagaaacttgccgctgactacaagtgacattctgcagatcgtcatctggcctgcttcaccgggccctcaaccgccgcctaccaggcactgtcaccggattatcggaaccatatcgaaaatcgactgcggcggctctcggatttcatgtccaactttgtcatgacctttgtattgcaagatgttgggttcctgctggtgagttatgatgagttgatatccgggatcgcctcagactgacatcgaatgccatgttagacaaagtatctcaaacaatccagcaaatggctcgaggattaacaacaacgagatgacgagaaacggaagttgggtgtagctcaaagttgtagagcatctctggtaaacacatcgcgtttatcataggccaaccgagtcgaaggcaaagggaatgtatctgcccacgtcgctccatttggagctctggtcgccgtagacaagatgcgcagcgcatatgaattgtttaatgaagtagttgacttactcgtcggtatctgagcgacgtcgctcgcatgctcgactttgatgtgttcagattgttcgggacgattcagagaggtgatatgtaccgtagatcacggcctgatgaagtgcgaattgatctcgccggctcgcacggagtacagcgagagatgtataggcaaaggaggaagtacgcacggatggaccatgtcagattatcaccagagctgagctgggtgtgagtattttggttttccttattgtgaataaactttgcaaatcgtatacacaacgctttgtggaacattcacatggctctgttctcgtcacagcagagtcttatcaagcggaaccgcctgtcgggattcctttttggtgagcaaaaacatagagagatgtggctggcaagggaaaaaactcgcacagcttttggtcttgacacagtgcgaattttgggagcttatggccgtggactacgcgggagcactatcgacttggtgtggcggacccattcgtgcttgtatcgctaggcaaggcgtgtcgatccgatggcatatgaaagatttcagcttcacacccacccaactggatatggtaaaaatgtcacgcgctggtcaaggagcggaacgacagaacgctgcatctcaagcagcaaagcttcgagttagaggcttgagtcgccaaattgggaagcccttccgccttcagtgagcttgaactagttgagtctgaagccaggaagcccggcaagtcataacgatcgcttcacgtgtagtagtgaaccctcgcgatgttgaccgagatttggttacctttgaaaggtactacaagagagcctgtcatgactatctgcagcgatcttttcctgcagataaccctcaataccccatttgaatttgcgtgtctcactaccggacgctcggatagggacgttcgattgccgatctcacacgctgatttgccttgtgccacgctgcgcaatgcaaggtttcaactttgtgaagggagctttgaattcgtacaaccggcgagtctttggctcctgtggacgccagctcttcatcactgtataccgcattctgcccggccgttgttagacctccatttcttccgcaatgtcagccggcttggctttcgggacgtctttgccttcgctaatgcctttcttgctcactccagtcctgtattaagcagatatcaacatattatcagagatatgattactgccgagggttacctgacacttcgaaaggagcgcttattagaagtgctgccagtcctggaatcgcgagcggctttttttgacttcttgggtctgactcgacgcttgatggtgcggaacttcccgcacctggagcagcaaaggcccactatcattattgtacgtattgtgtaagcctgttcccgaacagcgatctagcgtgcttactcacttggacaaacgggaacttggcacggaataggcacgccttgtctgacccaagcggggatgtcatacattgcgtgggcttgtgaactggtggagattttgaactggtggagattgtgaattggtggagcttgagtctggcagatacttgtaaagcatatctatctcatacaattcatcagatctacctggtaataaacacttcgattgcgaattgatcccgaagcgactgaacgatcggcacttccgggacacgcgactgatcggatggatatgagaacgcgctaacgagacatgcgtactcgtagtttcataattcatccaacacccgtaaggcgcggctgtggccagttttctgacatgcgtgcctgaacattcgaccatacaaagataccaacagacatcgtcgtctggaaatagaacattcaaagggtttcacaaagaaccttccaatgcgcccctgcaaggtccttgatgtcttcgctgtcgccaactaatccagctgcgtttcgagctacggcatccgcacagtagctatgttgagcatcgacaaagacctgacgatgctgaggagtaccagtattgaggttaatccaggctggtgacccttctcgatcaatgcgctgaatatcggactcaggtagaagatcctcgacgcgactttgaaaagcgggatgcaggaagagatctacgggaaagagaagaggagtgtcctcgacggtttcgccgagatatcgtctgaagagagttgccgggcctccgagtttgcaccaatggtttggtgcttgtttggtctccgtttctacgctaaatggctgttcgcagccctctttatggcactccacaatccgcataccagtctggcgcatgttgaggcgcttcatagaaacctattagcgaagcagcacgagcgatcagtacggtaggcgagccacagaccatttctcgactgacctgctgaacgtcagtgatgatagaaacgacctcttgaagggtcttcttggcattccatccgggaaagtgagctgcgcgttgcgaggccgattttatcgcaattgctagccgagccttttggaggtgattcataacctttcaagggggtttggtgagcgaacggtgtgctatgatgtaattgagtatccctcccaccttttccgaggatattctggaccgtaaccatgttaacatgaaaggcttgccctccttcatctgcagcattatagtcgtccagacctctgagcctttggggcaatcacggttgtccagtcgaaaagtatcatctttcagcagcgcggaaacttgagcgactcgttgtgcgctttccggggcgccgatcgagagggtcaaactcgcgagatctaaagagcccagagcaggatgcgttatatgggtgtgacagtgtattgggtaacaatagtacctacagcctcgacgagctagggagttgaagctaccagcaagcagtccgaagtcaaagttgtaaggagtagcgtcgcgaacgcagccgaaggcaacttacgctttgatatgccgcgtcgaggtagctctctgatcgtttaactgtttgatgatcatgaccgcttccttctcgatcattcctttcacagaacaggcccgttcttcggtcgcgaaggctttctcaccgccacagatctcttctgcagtttggacaagggactcgatgaggacatacaatggcagcagtgccggttgcagtgtcggagaatatctgtacaggatggcagcctcagaactggataagatatcgatcgacgaatttacctgtagtatccaggttccaaagcgttgatgctgatagcccatcgatctcgaccgtatgtcacaacgtgtagcgtcccacatatcttgacaaatccacctatatgagcagtttataaccctcgtatgctttcgagtgattcgctatatgcaagacctaccttcctgtaggtcgttccaaatacgctcttcagcttcatcatcatcctgctcgtcgtcttccttttcatctccatctttcccttcgctgctatcactatcgccgtcgttactttctatttccttggccttgaaatagttctcctcatctttcatttttcgaacagctcgggcgtatttgtgaagatcaatatcgtcggccggtccggattggtcgtcctcgagcaggagcttcgtagattcgtcggagggcaggatgaattgcttgccgaccagtaaatggtggaccttctcggatgccgtaacaatcagactcggccgtctcttttccaacgtcagagcgacgaaaacatcggctaagtcgagttcccgatggacagtcgtgaaagaccaatacgacatgataggcggcggtccgaattttcaattcgctaaggtgaagggacagatgctttgtcctctagccaatgagatgatcaacttgagaagctttggacctggtccggccgtctcgtcccaccagtgtccgaatcctgtgtcgcataatagaaacaacccgctttagccgcgaaaagagctccgcggacgaatcgcaatacaaacctttcaaatcataggctgtgatgtctttggctaacctcatggtaccagcagaaggtgcgctcgcgttcagtgcggcctgcttattagcttgccgggtgatcaaattgcgtttgcttgtttggctgaaggcgcaacggaatctgttgaagtgctgcttcatccatctttccagtttcttcgattgcctgggctcggagaccgctttttcattcataaggatgacgtcctttaccgtgacagggagcgaatacataaggttaagtccgccgggggccgagttccacgatcttcctgctgcagccaggatcaagatatactcaaggaccccccaggccggaattgctaattgtgcttgagatgaggtgagaccatctggccaggctggtatatcatcgaggtataactcatatacttgaaacctgttctcgtcgaaatccccgagcattctaagccgattgaaccatttagatgtttttgacgagttccgttgcctcgctctatgctcatcctgggcgtgacgacctgagggtgagacgatggtctgtccgaggtacttttcgtaaatagtggtatcgtcgccagccggcaaggtcgccttcatggccattagggacggatagttgatctgcgggaaagagtggctattcagaatcgtattgtgtggacataggagcagcccattaagcagaagtgtagatcctagcccgcacacatactggtctactatttttcagggcatcgatcacttcgtatgcctccccgacacttgtcttgcgcattctcacgtacaggtggaacttgtggtcacttgccaaatcctcgtcgatgtctgtcaatccgaaagcgtagcttcgtcttagcgatatcacttgcaacgaatcagccgactgaccgactaaggtgagtgccgggtgatccggacccagttcccagaactccgtcagtagcttccaaaggtaatccaccgtgacagctggcaatttaggacgcaggtcctctggcagtggttccaggcctagcgctagggcaaccttatctaaccgctcgaatagtcttcccggagagggagggtgaccatctgcgtcgataatagactctagcccgaggactagattcatcttctggtcaattacgtcctggatctcgtccaattgtgtgtctgcagcctcctggcaatccgtatatgctccagccagttgccagcgtctcttttcctcctccgagagcttcgaggtatcgaccccggcgggtagctcagtatactcctcttcgccaactttccgtgatctcttgttgtactgagtatcaccgccttccatcggtcgcttgtgttgtgatgactgcatcgagaaaaactctgtgccgtacttgaatcagattttctcaattgtgttgggtgcttccacggcgttgtgattggttgagttgcgaattcgcctgtgatgcttggaccggatctttcgagaatcctgttctctcaaacccggaggtctgttcgttatcaagcgaccgatatggataaatggaattgggctatagcaattatgccgatcgctccgagatctgatcaatacaacgatggtggtcgacgaaacatatcggcaagacgcaacgcgtccttatcctgtttgtgtcggtctcgccaaagacatcccgcatcccgcttgattctaccttccagtttttgttgtgatcgagtcacagtaaacggacaagaggggggagcaccagatgaggagcaccagatgaaggtggatcctgggtcctttgacagcggtcggccgggctgcagaaggacgaactggcggaatcaaatttggcatccacgacgagatgctgaaaccggaacgacgaaggacacccgacgacacgatgccggtctgaaggtatgatacatctgttcaagaagtaagttttgggaagagtaaagtagctcaaagttgtagaggagctctggtaaacacatcgtggcccttgtatgtagattgaatggaatgcagatagggatgtttctgcctaccgatttgtcaacagaagtgcttccaaggtcatcctcccaaaactccagctcgtcgccatcgtcatcatgccttcgacgacgcccccatactgggatgaattgaccgccaccagagtcacccaaaagcaaaagtcagacgagaaggaggatatcaacaagtccggtctgaagcgagcacgaacctctaatctgactcaaacacgattggtgattgctcgtgcaaagatgatcgctcctgcaaaggggacgtcatcaaacccgattgatctattgagccattacggtgcccgacaaacatcgcggccccaatcaagctcgcgtgcgagtgctgggataatcgtcgtctcgattcccacggatgagatgaagtttctttttcttcccctgcgctttccctttctctgtttttttcattgtaccttggattgccgatcaggcttaggtattcctcacgaaaagaacacacgacaaggcatgcaagcgtgaacattggtagggtatcatatgttcatgtgctaccttcagcatgggatatacgacagacgttctgtgtgtgtagataacctatttgatctccgtgaaacggccagactggcgctgtcgcacgtcggactcggttgatgcctcttggacctgagtcgcggtcgtgactccatgagatgcagctgtaggcttcatctcgacagattcgttgttgtctttcggtcttgcttgagatggactgggagccatgctgtacaggacggtacccactgtgaaggccgcatacgggcgtcagcatcggtaggtatgatttggtctcgtaggacggggagtcgcttacctaagaccatggcagcaccggtcgtcaagcccttgttgaaaccagccccgtaaaaccagaccgagatgcctagactgacagccttgcgaacggtcaggatcaaattgacactgacagatgagacgcgctgtggataggtaaagatagtcaggacgggatactgcgtgcggctccgacgtatacttacagaggtcagccggttgacgccgttgatacagagaccttgggtaaagatgttcatggcgaacgcgatccaggctgaagggacgccgatagcgaggacgttgctgttgggagttccagggtacttattaggcaggattccgggaggcatagggatgcgaaagactgtgggggtcgtgttggtaataacggcaaaatcgttcgataggttcgaaaggaaaggcatgaagaagggcagcgaaagggcgtgctgcgacgaaggagcgagtgagctgagaccaacgcagcgctcatgtcgactgattcatgctcacgctgtagaagattgactcttgccagacggcacctccgcgaccgtatttactgtaagtcttttcctggaacaatcccataaatgccgagatgactaatgcgagcgagaggacgcccacgccgatgatgtattgcgtattatccgggaaattccaaccgccagtggactgctgctgctgaatcgagggcggtttgcctttaggtttgggtggcgcagaggccgtggccacaatgatgccaacggtgacgagtgcaaccgatagctatgtgcagagtgaagctagactgtcagcatgtactcggtgggaacctggttacataaacaggaagtatgtactgacgacctgagacccgctgtatcgtttcttgcctgccagccagcccactaccattgagacgcacagcccaccggagcggaagataatgtggactggaaccgggacctgcagagcggatcgacggggtcgatatttgaggacattcgattagttcgacaccgaatgacgtggtcggcgagtgtataggttggtccatgtcaagccggagtggacgatgcggcaagcaacgcaatttgacgtattcgacgtggatcgtttcaagattatcgagacgtccgatagaagatcgaagaggagttcatgggagatgaagaacttcgaatgagcgacactatggcagaacacgccgatgaagtcgcacgcaccttgagcccaaacgccaggttgttgagtaacgagacggccaggaacatgatcacctgcccggcccaccttttcaaaggcacaacgcgaggtctaagtcgggggagtccgttcttgaaggtgatctgagtggagagggtggagcaggcgacataaaggaactggacgaatgtcaggaagatgcctgtggtgcaggtcggtggttgatgcaaatattgttatggattggtttcaagggcaagaatgacgtgaatatgacgccggtgcgtgtgtattatgtcgaagtgaaaggcgttgccgaaggtataccatcggaggagataggcaatccccaaatcccggcgtcaagaagatcgagcgttcccgatacagcgtttgcgcaaatcattttgcgtcgggcccgaggcgacccagagacatgtatcaagagatggaatcaaggtcggacgtattgacgtccagtccaggcatgaatgtcgacccaaagatttaaacaaggtcgcgagcataccatataggcatccacaagcaggagaaaaggaatcgtgtttttcagccttccaagcaaagatgctaacacgtgcccaactgaccggcacttgggtggctctttagaacggcttcaagggcgaacacattgctgttcagtgcaagttatgtactcagcacgttgcgattgagacaagtaattgtgaaatctggaacggatggcttcacgctatttattactcacgaacagcaaccgccgaacactaggctaataatggttgcccaatccaggagaggcaagtcatccggaaaggcagcatcgccaggggaccccatcctagattgaatgtgagtctgagcaatctatggggccagctcgtccgtcgaggtctaagtgacgctaacagaggtgatgaacagatgaaccgctttgtacaggtagccaagcgacgacaggttcggggatcggcgtcctccgctaaaaatgaaaaaaagacacgtcatcgtcgacttcgcgaggccgatatgagggcgactggagcataaagaagggcaaaaaagctgcccactccccgatttgaacgagggaccgctgtatctcaagccgcacagactacaagtacagaatgataacgactacaccaagcaggcaatgaattttcagaccaagatgtcataacttattattgtggcaccttcatcctagctgatagaagccattcgagcatcaacaaacatgattgtgattacgaaccgaacgatcacaacagattgtaaggccggtgaatctgcttacgcgacttacagacatcttcgacaaagtcgtacagtttcatttataggctgcagatcgccccgcacggaccattcgttgcacggccaaccgaaattttcttgcaatattgctatgcagacacaccgcagtttcgtgtattttgatgaaccgcgatctatgcgctgcaatgtctcgtaaagccggcactctccgccacgtattctgactatcaaacggagagacttacataatatacagtactgtagtatagcgatcgacctttatatgcaagcgtggtagcgacacggacattgagaaatattgtatatccatctttcggcatcgacggatggtaacgaattaatctgtttttttgtggcgttatcggaaccaaatagcctcgacagcggggacaccgccaaggtttcacctgtcgtcgacgctactcagacttcccctaactacgaatcaatgccgggcgccaaaggaaccgtgatccaccttcgcttaagcctttctcctttcagctaggcttttgtagctcaagcaaacaattgaggattgattggtcgcatgtaatgcgatcagattggcagcttgaaatgatcagatcaatcacaagatccgtcgactcaaccgacacgagatcttcattcagtgcgcgtcgaagctctcacttgtgaagtcatccatctgacatggttgaaccgtcggtcgtgaatcgatctgcttcaattcaggcggttgcgaacgtttcctagacatcgaatccaaaaccttgctttggtatcgacatcattacgggcctacagctggacaacctcctgtacagtacaagtggacaccatcaggatcttttcctggtaccctccgcgaaacagcttcctcttcccaaaggtagggatgaccatgaacgaagcaagatgaccgttaagttctttttgccttatcgccacagatgtccacggtagcccagcagattcaagctcgtctcggcgagatcgaggacatcacaatggagcacctcgagctgcaagatcgagttacaatcagcgaggatcttctggaaccagagatcttggccgagcttcgctccccaccctctgctttaccacctcctgatcgttccgctttgttataccgcgttctcgtgcatatctatcctcggaatgttcccgttccagaacaccttcggcctgatcttccgacctggaccgttgactatctccttcggcttatctataactattggaacaccggcagtgaccatccagctctcactgctgtggaaactgaagcttccgaagggaacgcggacaggaatttcaagctctacgtccgtatttttgcgtctaccagcaaagataggatgtttgacctgctcagcgggtgagtgtgtgcattatttccctctgcatcttcctatactgaaggcagtgatctgcatagctacgtggaacagtaccctgctgccacaccatcggtgcgggcgatgcaacgctctttgaccaacccagatgttaacactgtcggaccggtttttgataagtacctgggtcaaactcaactcgacgcttcgacgaggcacaagacagacaaacagagggcttctggcaagagcaggatcactaatcgatggcgcaaccgactgagattcagtcctggggatattttcaaaatctacgagctctccaccccggcaatcatgccggtagacggcgaacaagtttggacttccgaacaatcttggtacggcaatcctgcttacggtatcctagaatatcttctcgttctgtcgagctgtgggagatcatggaattcagcccacgggggcccatgcatactccctcgaaagctcgcacatttgaacaagtttctacatcggcctaaatccaccggcgcaaccgccacttgcgcggtagaaactctcaccagcgagagagatttcggctggatgaagcttcattttgaagccgcccgcgctaccttcagcgcggccggttgtaggctccagaagctagttccagatgcagctctgattgcggcttcccgaaacgctgtcccttcctctcagtcaagcttcctagtccttgccaaagatatcacggtgtgggaggcccaggggtatggttcatggtggactccaacagcaggttagcgacaaggcctttccttcgaatctgccgtcactaactgtgtcctggttaggccctggtccgaagctgctgaggtttctgcttgatcaagcatcaggcttacaaccttgccccttcagctttcatatcgacagtaaccagatcatttccagctatccagccattatcgattactgggcagttactctggagcatactcaaaatcgcatagctagtgatttcatccggcagtacatggacaagaccaagcccacggtgatattgtgcttatcagccaagatgcacgagctgctcagctcgaagcaagcgtttctcatcaagcccagagccaggagggttattaagcctgagaggtatcatgacaatgataactcggacgatgatgccgacgctgatagcggtaggaaagatgacaatgaaggcggtggagatggaagtagcagcagcgagaccgactacgacagtgacaatgagagcaaagacggtagcgacggcgatgatgaaacggaatggagggagctgcaagaacgtgagcgattcgagatttgatcaggttcctttgagccatataactgaccatggtcctttcgcgtgatttttaccctgacatgacttggcattctttcaacgatggcgaccactcaatattagctggcttcctcgacctgatgggtaccgtccatgttgtctcctacggatcggagtctgctcagggatgggcggttagtataccgatcgttcatccaggggcattcagttactctcccatccttcaggactccatgttgcatcttcttctgctcgtgacaaggctcgctcaatgcgcctcgactctggcgatacctatcaccaaggaagaaggagccatagctttgaaggcgtcgattgagttgaattgtgcggagcttatcggagagatacaagtacacaaaagcattgcacgtagacacgcaaaggcgataaactcgctgagacgtaggacttgtgtgtatcccgacttgaagctcggtgagatgaatctaacataccgctgtaaaccgacagatctggcaagcctgattgtctcggtcggtgcccctcaaagtgcggagaggcgcgcccaggttcaagaactgtcagaaaacaagaattttaccctcgacaacgcagattgtcccaaaggctcagatatctggttagaggtacaaaatatgcttagggctgatccgacctcggctaaatcttaggactaaattagatcatgacggacctggcaactggcaagccgttcatgttgacgtggatgcgagcgagattttcgtcggacaaggctatggagcaccttgaaaaagcgcgagctgtagcgagacgatccaactctacaaaggcagcaagtaggggaccctacccaggttggaattcgcaacgacagctcagtcaagtcctagaaatcatgctggacgtgaccaaagcaaacattggcaggtctaagatcacgcagactgggatgcgtatactcgagcatgaatcagcaagtgagtcaaagcgaagctgatcgtggagacagagaggggacactgattttcttaccgcagcttgcgagtatcccataggattagagacggagaacctaagacaaaactatcactggtgccaacccacaggagcttcgagcatgagttaccgcagccacattggcatcgaattcagtgaaatgccattattatggccggtcgacctcttcaagcatcctcattttgaaaaacagatacgagacttactgctggagtctgaacttcagatcgactacgtggaaagtgcgggtgtaccagcctgggttgaccgcaccaagggcacaaccggacaacggcaggagttcgtgtgcagacagcatcagtatgccaaagatttagcattgagggagaaaagaaacctcttagatcccaagcagtgctcagctatcgctgtccagcactggaatgatttttgcagtgttctatgaacgatgatatcagagactttgattattcaattaatgcacgggattctttgctttgccgtggttattgtttattttgtgctcaaacttaggggattcagactcagacttagcgcgatcttcgtgtatgaggagaagaagaagagcgagagcaaccatacctgcctatcagtgcccaatgacgacacctcatctctggaagtacgaagtttcatatcacgtctaatttcctcgttctatcgattcctagtataccagctgtctcaacaaaagagaatcctacagatttgggccagacccagaagcatccgcgatgccttccaccccgcaatgggtgcgcgacttggtacccttgatcaacgagaacgaagcctgtcctatgaccgggaagaaacattgctgtctgaagtgtggaaatggattcaagcctcttaaggcgaagaagcagaagcctgttcgcaaagagagactgagtagagccggctctacctctaacccgaaggccttcaggtgcgtctcgccattacccctatttccgtgtgacgctgcatctagattgatcacattttatcgcgtattggacagatctagagtggctgcgaaggccaagaacagcgaaaacaagggtaaatccaaagtttagccgccagaacctaaattgcccgaacgcaaaatgagaagtaagctcgaacgagtatcgtgttgcgatcgggccttgctgatccaagcctttttcaatcaggtcgatcgaacccgatcagcctcccacctcgtcagcagagaatgagaaagatcggaggtatatcacgagggagcttgctcgtgagcttggcaagcgtctgtgccatacatgcagacagacagcggccaacgggagaggctcggatgccacatcatggaaatgtgtgtgagcggcaaggactttatcgatctgtattgtttactgtactgccgaaagtcagtgcagtaatgattgcggcaaatctctgttcctgtgggagaaaaggcggataccttctctcaacacctcagcgatctgaccgaagttccaagctacttgtggtccttagtggatctcggacggaatatagaggcaggatagaccgcaaagtccaagctgtcattgtcaggtgagggcaaaatttgacatatatggcggacacgaaggcgccagatctctcttaaggctacaaatctgcggcctcgctcttacattggcgcaccatcttggccaagaatcaagctgagctcatacatctcaacttgttggcctcacatcaagcaaaatcaactgcaagagctatccctgtttgtacctccccacaatgttgaggcacaccgcattttagtctcggcttcactcagtatcgtatcattcttgcgtgtcctctccaatgctaggcgaagaagacctctcagcggcaaaaatgttgatccagtcaggggcccttctaggtggcgtcctaccctccagtctagcgagcgcatagctacgctgacattcctttctctcgtcgtccccggcgatcgtcattgtttggactgttcttccgtccaagaatccgctttggtcaagcatgtattgaatggaccggcgagttctgtgtacctctgaaggtcgagcggtaccatactgagagtccttccatgtcgatccaccgttcgttgacgacagtgtgctgctcggggacagaatgtcgcttgcacttttacagccatgatcgaatacgatatcgacgtcgcgcggcgatgacatcggggcggaggtgaaagactcttcggacccgtcccaatcattgtcctcagtatcgctgccagtattggaatcaatgtcctggtcgtgaagttcagtcccggaccggtgaccgagacaagtattcagcgccgaagaggatgaagcgcgacgccgttgtggcgtaggcgattcggcgcggggaacttgcatcccgctcctgagcgctactgacatcggagaacccgggtagattacgctatcatctgttcgcttcaggattgggcggcggtctcgtcccggtgattcgatgtcattacgggcagatcggtcgggagagcttccgttgaaccagacgccaatctcggtcttcgacctacgcaatgatctcccacgctgagtcatgacatcgtcattagccactactttggttagagattggacgatggaatactcacagtggcacccaaagtcgacactcggcggactcgaacgtcgctactcttgtttgacacgatgctctgcctctcttgccgttcacccattcccgcgcccacctcgtcgaaatctttcaaaaacaccgtatccaccctcggaatctgaggcaagcattccctttgcaaacttcctattccgttgccgatatgtctgaaggacggtctggatggtctaggggaggaggcctcggccctccgaggtttagggctttggaacgtctgcctaaagattcgttttagggaggcggtagcatttgcgcgtcgacccgtctgtgtagatcccttggtactggaagggggaaccgtcgaggccgaacctgtagtcgacgtcaagccggatctatcagactcggacccacttgttccggcagccagagctgtaggagtggctgatctcgagcgaggaatcattgctgggctcagtcgtaaggtgggttttgtagcggtcggagtaatgtcatcgtggaagctcggaacaggcaaacttgctatgtcacgtcgaaatgcaatctcgtcagtctaggaagatttgatctagcagatttcgcacggacactcacgtttcatctccgtgtcaagcttgtctagtcccgtggacccgcgcctagcagtgccttgctgcctaattcctaacccgatcaaaccgtcattcttgcgttctttcctcctcaagcttttcataggcgaccttgttccaaactttggtgagctcgccgtaggactctgtgcgatagcgggagagggaaagtatcccgttggcctagcgttcggggtgctgggtacgctagatgtcgagaggggggacgaggtgcaggtcgagctggagccagggctaaagaagaatggcggctggggtgattgaacggaggaatcggagcattgaatgttgggcgtggaggtgggggtgatgtcgttggcaagtttcgaggatttcttgggtcgaggtgtttggaaaggcgatgccaggcccggcgaaggtggtctgttcgtgtgcagcgttctggttcagtcaattattatacggttgagaactctctttctaagctctcacaaggatatcggcaattccatctccatgcttgccctgatctcttccctactcccaatcatgaatggatccggacttgtggccaacctgaagccgtccagttcggcctcgtcatcgatcttgggaatgtcaaagcagaatacctcgtcatcgtgtcgttgttggaacggactatcgagtgtcgagccaaagacgtccgtatagtgaccattcgacctgacatgggcagaagaggagggcgcttctgattgcgtatgagacgagcgttggaccttacagagcgccaaagaagagggaggtgggcgagtaagtggagtacgggaacgattattggcgctcttcggcggggtcatgggagattgccggggagtttctcgcctggggctcgacgacggggtcataggcggggtgtgcattctcggtagcgtcatgctcatcaaaccgggtgatgtctcggttggccagccttggtccgtttgggtgaccaagtagagtagttgagtgggtcgaccgagtggcatactactgtatgacttcgatggatgtacgactgatggtatgtctatatatgtttgtcgacgtagaccaaggtatggactatccgaattacccgatctggaagggtaacttcgctgtcgactcggctgtacagatcgagtctgagtgacccgatcgtaatttgatgagagccggctctatgatctatgagctatgtgtgtgacaaattccgtacgacctcgtcaaagtgattgttatgatgtcggacactcgcgatgcccgtggtctcggcaggtttcgaacttcaaggaatactcgtcgtccgcgtttcaaggcgcgcacggacccttcttgtcaggctcgtgtcaggcagggcactagaagatctccggggcgaggtggaatctcgatcgaaaatgtgcttgttgactttgattctgcctgccaggtttgaaagctgtgtacctttggacggatgtctcggtggttgttatgagaatctcggttacggtccagaagtcacggggacggaacgccgatctgttgatgggcggtcgactttgattgatcgagtgattaataaatcgaacgtgtcaggattatgattgattgaagaaaacggtccagtaccattcgacaggaaggcattgtggctctcccggaaaagattgaatcggatatgaacgtccttacttatacattcccacaaaatgcccacacaaagataaaacctatcttttttgattaccctaatcaccatcatttcgcgaatttctggtctctctgctgtgttcccagctcgcaaaaaactccgtgttagaagcaaaagccaatgacgtccagaagtggaagtctagtccgctcagccgaagcgtttcagaaacgtctcgagggcgggttctagatcgcgatgatcgtcgttaaagtatcgttctgaccctccgttggccgggtgggtcggcgtccgcaacgcccggcgataagcgatcaaacaaacgcagattaagaaggaccgaaatttgctccgaacagatatgtgcctacgtcagactctttgatggacaagcattcgcagccgtgaggaccacggctgtagaccgaatcttcaactgccgtactgtcaagttcacctacgtcaaaaggggtaaggaaactaggggaaacggggaagattacatcatatttcccccactgaggccactgaatcacatgatctcgagatcatgatcttgaagaggccgcccgcaaaccatcaatcctcctcgcccctcagactcttgagggccttctgccttcgcgcgcgcgtgaggggcgacaaggcgggccgaggaggaaaaccttgacaatcgggaatgaaacgcgatcacgttgccccgtcccgccgcggggtttccccttcgagtcggaccatcgatccgagccgagatgatgtctgcattgggatgaaaggtccagcgttcaacgtcgcaaggtgaagcgtttcgggttgggcctaaatgacgtcgatccgtgggtctcgatcctggttcaaccccgatctctcatcggggagggaagtttcaaagaggtttgcttgtcgatattgatcagcgaattcttctgttctagcttcggatcctggtcgggcctctagtacgaagcccgaaagaaggaaatcttaggttgaccaagtgaaaggaatgacacaaacaaaggacggagcaaaaaacctgacttacggcagcctttgaccggactcgaacgcaacgcaaattataccactgttacaatctcatggattgctcatagatcaggacgatatgcacacgagtgacattccgcagcccgtttcaaagttcattccggtgcataaattccggtcgtatcggaagctaaccgtaagatattgccttttgcgcaccgttgcgacctgggcaccgttgccttctgcgtgtcgatatacaagacgagcaggctgggggacgagtgacactgtgctgagccaagtggtgggtgcctaaggcgtaaatttgtcctggacgtgaggcaaaaaccatcgcagctgacaatctatcaaggtcgagcccctctcatggcctctcaattcccgtcgaattaccggttgttgaccggttacgaaatcgatttcggaagcaattgctcaccgaagcgagtgtcttcggacatgtggaggccgtccgacgtcacctcccaaccaacacccacgacctgcgacctgcgacttggcgatctcggctctggggcggggcgctccaaaagttggattagcaagcagcggattaaaggtcgcaattcatataagggtacgaggtccgtaacgtatggaattatcgttgagtcgtcagcaccaagcgatagtctctattcccaaacgcaaaacgattcaagaacgagaactatatcatgtcatccacacctaccacctcccgagtctggatcctcgccgagccccctactggacccatcaactcgtccaccttttccctcgagacgcaagatctgcccgagctcaaggatggccaggtcctcgtccaacccacccacctctccaacgaccccgctcagaggacctggatggacggagacacggacccccgtcgattgtacgccccgcctatcttgaagggacaggccgtcaccgctggaggaatcgccaaggtcatcaagagcaagagcagcaagtggaaggaaggtcaggaggtctcgggaacgttcggatggtatgaatacggcgttgttgatgagggtaagatccagagcgagagcatgtgagtcgatgccgaacatacctagcagaccttgagaatggcctaacaccagattaattcatcctctgcagtaagattcctgaccagtctcccgtcatctccctctctttcctcggaggaattggattgaccgcatactttggagtgttcgacgtgtgcaagcttgagaaggacagcgtcgtcgtcgtcagcggagctgctgggtgagttgcgggccgaatcccaacgctgccctcttctcaataatttggtgctgataaggccggtgcaacgtatcaacaaattgtagagctgtcggttcgactgtcgtccagatcgccaagaaggtggtcggatgcaagaaggtcattggaatcgctggaggcaaggagaagtgcgactggtaagtctcggtatctcgacctatcccctatctgctttgcctgactgatgaatcctgtccaatcctgattacagggtcaagtcgctcggagccgacgagtgcgtcgactacaagtcttccgactatgccaagaacctcaaggacatgttgcccgattacgccgatgtctactttgataacgtcggtggagagatcttggacgtcatgttgccgctcgtaaagcgatacggcaaggtcgccgtctgtggatccatcgccagtgagtagagggtatgataatcatctcggccgtgagacgagcgatagctgatgaaatgctgtcccaatagactacaacggagagccaatgaagctcaagaactggcgagaggtgagcccagagtcgaaatactgtcgatgtccgatactgacgattatacccacgattcttgtctccaggtaatttacaaccgattgcacatccagggtgagtctcgatgccagtctgtcgagtagtgtcgaccgttgctgacagcgcctgcccacgtcataccaggtctcatcatcttcgactacctcgaccgagctggcaaggccatctcggacctcagcggatggatcaaggagggcaagatcgagacgacagggggcgagatggtcatcgataccaagttcgaggacgtgcccaagacgtggggaatgctgttcgagggcggtaacaaggggaaattgattaccaagctgcagcagtaggcgctggttaaagcttgtacgcgaagggagtcgtaacattgtagctcatgataaaaaacgaaatggaacatgcctaaacggtatcagggaaagcgctatggatcattccacccatgctgattcgcaagaggccttgaaatgaacagtatggcaaacgtaaatcgatcggtatctagaagtcgggcagagaagcattgcacatcctcgctcctcgatcccatccgtgatgatcttcataattacaattttcaccttcccagacgaccttttcccgagccccttgaccggccatccttgcccatctcgggagacccgctcagacacgtccctgcgggctgacactcctcctcctcgatccggccccaccgccctggttcctcccctgaagccctcgtccagcttccctggcattgtaacccgcaggaggtcggttgaaagcaaagtcactgttggcgcgcacgtcgatgagcgatcgtccaccctcatgccggcaagggagaaaaggtcgggacgtaccagtgaatcttttggtcgaggaagtcttgcccgttcatggcctcgatggccttttccgcctcttcccgctgaccgtactctatcagtgcgtatccctgcgtcaaatccccgacaacatatgggagtcatcagcgttcgctctcggaattgaagagaaatgcaccgggccgagagggggacgtaccttgacgtaacccgtacgtcggtccaagttcaagtggatgttcatgacttttccataatcggcgaaaaggtcggtgaggtcctcttccgaggcttcttcgtgtacattggtcacgacgatgatccatccctcgaccgctgtcgtatgggacgggtcaagagagcacaaaggtggtcaatgagcggggatgtgggagcgggtcgagcgggtggggagagggcgtacatcgtgcagcgacgttgctagagctcgaatctcctccagttggtacggattcataatccgattcgcctgttaacggtcaatttggtatataggttgtcgataaagtccgtccgtggaattggtcattccggaaggatagattatgcgcaagttcaagacatgttcagcggacccggcccgcctacgacggcgtttgcctgaaacactcgactcaccaaaacctcgtcccttcttcttgatctctgcacgatcatggtattccggtaagccagagcgggttcacattgtgctctgtcagtctaggtgtacacaagcggtctccattacgagtagtgctcgagctcggacctacccccgtcagttccacgcatttcgacgtcggccatcttgaatcgtttggtttgctagtatgaaagttgctctacgacttgcgatacagtaaggccttttgacctgtcgacccttgatcatcatcgggatgagcatgatcgacgaggtgtggtcaaggtgattctgtgagccccaagtgcataattaattgataacagatgaatcgatgtgccgtgggaatgacgtgtcatccaagttccaaaatccaaatatacctgaaccatcgctcatccccgaaagtcgtcatatgctccctaattctccgattcccatccgatcgatatataagtcgaccacattcccacctctcgatagatccgatagatcgatgaccatactctggattcaacgatcgtactgggttcagatcttcaaacatgaagctaaccagtcaggcgttgtttgcgttcgccttggcagagagctgccaggccacccttagatccggcaaagatgtctttacacccaaggacatgctctcactcccccgcccagctcccgccatcgccagtccggacggtcggctcggactgagcatggtcggcaagtttgcatttgaacaaaagcataccactaaatccctctacgtcatctctctcgacccgaaacgagcggaaaaggacgaacctgtcctgctcgtccagtccgataagagcacgtcgatcggggaacctctctggctgaacgagcatgtcgtcgcctacttgaacaccactggagggtcttccgaactctggtcaatctcattgaatgataccgttcacgctgcttcgggtgggaaacagcctcacctccctgctcctcgacacctgcatacgttccccgtcgccccgtcctcgttgaagttcaagcctctccaagagaccgccagtaagaagaatgcacactctaccggaatcttggctttctctgcttacgtctggaagggcgcttcgatcgaggatacttccaggctggacaagctgtgggccgaacgggaggacgaggggttggtctgggacgagttgtatatcaggcaagtccggcccgttcgtgctagatcggcaggccaaagctgacgtctcgatcgcgtccctcttcgtccaaattcgcagggaatgggatacttggaggaacccgggcaaggttcatcaagtgtttcttaccttgctagacatcccccacgcggcatcatcggccaaccggtctgttcttcctcatcaagcctacctagctccgttcaacggcacctcgacctggtcgctcatgcaaccgttcgaatcgggtcaattcgacatctcgatcccggcacatggaaaggacgaggaacccaccgtcgacgtcatcatcaacgtcaaggacaagtcgctcaattacgcctttcacacccgtcgtcagatctacctgacctcggtcggtttggaatggaagacggtatccttgtccggatcgtacccttacgaggggtaccaattcgtcatccgagactctgccaacatcaaggacgaggtgctcatcacgtctggcgatcaggccgccgtctcggaatcgaagttctcgcccgatggaaggaagatcgcctggctggagatgctggaagataccaacgagagcgatcggaacagggtcgtcgtttacgatctcaaaaagagggaaaaggccgtctggaccgagacgtgggaccgaagtccgagctcggtgaacgtgagtccagtccatttcgttcgtaagggtctgttacataacctgacatataacaattcggtcgcagtgggccctggacggtcaatctttgtacgtgattgctgaggaccgcggttcggccttgccctaccatctcaagcaggcggatcgtctccctactccgctcttcttcaacggatcgaccgcgtccatccaacctttgagtaacgtgacctttttgttgggaatcagcacgctgacccatccgaacgaggattacgtgctcgacatctcggatacccaccctgcattccccgaggtatccttcgggcagcctagtggccctttgcccgccttgagtgatatcaagcagattaccttctggtcccgggacggcttgaagggcaagcgtttgagcgagggcgaggcgttctggttcgagggagccaacgcagagcgggtgatgggatggatcgtcaagccgcctggattcaaagaaggagacaagggcaagttcccgctcgcctttcttattcatgggggacctcaggtcagttctcgcaggccaagatggctcaacggtctacagctgacagtagccgattctctagggcgcttggctcgacagctggagcacgaggtggaatcctgcagtctttgcgcaacaaggtatgtgcatcttcggttatcaaaggcggatggatgaaggctgagccgtgtgagactcccttaggctacgtcgtcgtcgctatcaacccgcacggcagtaccggctatggtcaggaattctgcgactcgattcactcgcctcgcaatgactggggtggaaagccttatcgcgacctcgtcgccggcctgcaacatgtcctcgacaagtaccctgccatcgatcgggagaggctcgtcgcggccggcggatcgtacggtggatacatgatcaactacttgcaagggcacaacgctcatacccacttcaaggccatggtgaaccacgatggagtctttggtacgccattcttattgcctgatcagatagccttttcaaaacgctgacgcggaagtcctacaatcatatagacatgaagaccatgtattactcgactgagcaggtttacttctccgagaggtaggagcgatcgtcacattgcagcttcgacccgtgctaacaagctgctcgacccgatgctcagggagagtggcggcatgactccgtgggaagatcgatctcaatacgaagagtaggcgcatcttcctcgcccttttcgccgggcccggtttctaacgcctctgttgtggcagcttcaaccctatcaactttgtcggagaatggaccacgccaatgctagtcattcatggcggccaaggtaagcaccccttgtctagttccgtcaccgcatcagtctctaacctatactatatgctagacttccgaatccccgactcgcaaggcatcgccgctttcactgctttacagcgccgaggcattccctctcgattcctctactttgccgaggagaatcattgggtactcaagccgcaaaattcgttgcgatggcacacagaggtgttcagatggttcgacgaatttgtcggcgaagagttttcatcttcaagcatggtcatacaggcttagagagagcaaagttgcaaacgggacgtgaattataggtagcttgtgttcccgcggtcgtatatacaagattggcagagccggcatgtcagttatacaggaatcgccggaacgatacgaagttaaagcgaaatcaaatccatgcaccaatattgtccccctgcttgcatcacctgaaactcgccttcttcagagcccgagctggacccatccccgacgcctgcccgacctcgagctttttcataacgggaacgctcttcagtagcccttctttatgggcagacgacgaggtcgaggtcatgtatcctcgagcccccgacgtggatcgtgcagtgttctttgtcggagatacagctcggggacgggagccagcggtcttgatcgaacttagtcggtctttcgaggttagcagagctggacgtgccctgccaagagcgttatctcgcgtcgaggtcgtcagggccgaaggcttccgctctgttgaggtagcggcagcagcagcagccagagttttcggttgccctgccgtgtcgacaacgtcggtcgcatcctctccgatgtcgacgacttcttctgccggatcctcgtcgtcaaatttaagtttcctggcctttttcgcagatgccaacttttccgctacgatcttgtgcgagacgtaacgtgccagtggcgtagcaggtcccttgcgcgcccttcgcttcagtgcaggagaagcggcttttgaaggtgacgatgattcgggacgacggctcccacccgcaaggggtgacgagatggacggtagacttttggatctcagtggagtaagaagccggtgtgcggatgtaggaggataacgcggaagggagtcgtcccgcgaggactcgctcgacagggaggccgaccgacgggatggcgtggaaggcggggcagattggctgagagacgtgtcggacgatgttgtcgttgtggacgccgtcgacgagccgggcgacggttccggcgatcgtttcgagggttcccggagcaattcttccaactcgcgtgcccgcttgtcttccaggtacgctgcgcgttccgcctcgaagacggccctctcctgcgccaaccggacgaggccttctgtcatccgacgtcgctcgacttccaccgcttccttctctgcttcgagctgttccttatcctcgctgcaatcgattgatatcaggacatcgcacattgatctttcgaagaaaagttggactcactctgtgattgccgttgcggccaaggccgggacaagctcttctacggagggagtgccctcgctctcgtcggtctctaccttctccatcacgtgtttgagcaccggtagcggcctaccactggtcttggcatattctaagaccagctcctgtgcctcttgtgcggcttggcgagcgttaactgatagaggatcaaggtcaaacatcagcgctcaggctcatgtcggcgcggtggactaaacccaccaagctgttcctctacatcctgcatcctcgatttcatcaactgcttgactctctccaccctctcgccctcgagggtctcgagatccaactcgctctggtatagcctggccgtctccctcttctcggtcacttcggcctcgatccggtttttaagcctcgtgacgagttccctcagtcgggtgtcagccgataatgggtgagatgtggacgacgagatttgggaagaattgatggattgatgagcgctgaagaacgccgagggggtgaggcgagcgggttcctttacaagagaccggcaaaaggagcgttagtcttgctggtctttcggataaatctgattggccacagaacgtacgggttcccccgaggcgattgcgagtacaccctgtagctgattagcagtcgaaagcgttacgtgcctgaaagcctcgcactcctcctgcaagctgattatcgtctggttcaactcgttgattgccgggtcccaaaacgagtcctaacgcggtgatccgtatgagcttacaacgacatgccgtaggaatgtctgatcgggaactcacagcacgagggatctgttgtaccgggtcgaccggattcaggagcaacatccctcctctagagctcgccgtcgagactcgagcgttatcgttgcacaaacgttgccactgctgcatcgtccgttccagctgtacgtcacgtttcttggcctcgtgctatttagacaccgtgcgtgtttgtaagtacgggagaagatcgatcagaacgaccatgcggactcacctgagcttgagttcggacaaaggcgagagcgttcctcgccttctgagtttcatcctttgtgatcttgtgcgccgcctgctcccgctgcagcttgaccatcaaatccctatgaaccccggcagacaccgattgagccatctgtccatccctgcgagacgtttttctcgctctcatgctcacgacatttgagctttagtcccctccttgtccttttccgcggcgatgacccggcctttgagctttttgtgcatcccgcagagacgttcgtggtcgtacgacaagacccggtgagccgtagagatggtctctgttcgctcgaggtcttcctgtagcgtgagcatcgagcacatttcgagatacgagtgagttgctctacttcgtttcactccctcattctcggacggggacatacggtccgcttctgtagcatgccctgcaatatccggatcacgttatcccggtgtttcgagctcaatccatcgagcttcaaggccgacttggtgatcccttgtgcatacagttgcgcattcagatctaccaagttggacggttctctacgttcactgtcgagaccgaacaagggcttcatttcagcaatcgtcctggcacggctggttgcgtacggcggatctgaccttgacggcgaagtcacgcctgatgccgacggcatcgtgtctacttgtatgttcgttcgactttctaatatatcgcaagtagtgaggtgcgagcttgaactgtcttggcaacgacaacgatgacgatagatgatgatgatgatgacgatggatgtgtacaaagtggttcgaatggagattccgaggatgttgattgtggtttgttttgaaagttgattgacaatctacatcgtcattgccatatcacccaaccaggtaattacgttatattacgttgcatcgcatctgaacacatcgacgcgtgggaaagggaaacccgtgacgagctagacgtcgtcaagatgaaacgtttcacaaggccctcccaaaagtccaacaagaacgtgtaacgtcctcaagaccaagcgttcctcacttttgccgtgaaaatggcttgcctgtcgtgagcggcaatccggtggccgatgtggagaggtacattgagctcagccacaaatgtgcttcatgacagggtcttgatgcgaagcttaacaacagtgcaggttgtcgattcgaggatttgacaacgacgtcgacacaggactatactcgagcttgtcactgcaagccacttcttcggccggtgagaaccatgcgctgggttcacagtggtcacacttaaatatcgtatcaggatcaatagccgtttcattttactttgaggccgctcagtagctgtggccctgtcagccgaaaaagccgacgacacgggtatgacaagtcgagatcgatggaatttcaccgtttcctatctcaccgtgaatcatgtcatacatcaatgaccacagacgtctgcacacgggcgacctgaggcagtctatcttgagcctgccaatcgcaccccagtcgtttgcaaggacacgctcaaacgatgttgtttcctccagggcaaccatcttttcccgagcccttcctccataatatgttgagacagcggggaagtctggaagacattgcgcacaagtgcggttggcgacaccgcctgatagacgtcgccctgatagtcgaggagctgcgactgcggacgatgcagtgatcgtggaaacgagattgagatcgtacgtggggaactgtccacctctactatgacacgagccttggcccctatggagtgaggatgagtagattcttgcccgtttcattaaccgaagatagtttcgggaacaagtccgaagcgcgacactttagcggaccaagtctattccacgtcgagttgctgtcatccgacgaggtggcttaggcagtttggaggtcagtataggaaatgttctgaatcatcgttccaggctggccagtctggatcaaagacgagagacgcatgtccgacccgacccgacccgaccgactcgctgcgttttcatatttcataaccccatcctcacagacccccgacagaggccgcgatcgatcttgtgacacgatccgatccattcgtccctccacccatcttcctgcttccctcttcctagccaggatcatctactgctgctgggccttgagcttgtcctgctcgtacttgaggtagtagacatcacggactcgctctgcaaagtcggggcaagagcgagagtttcgatacaatggtcagcttgcccgtcacgactaatgggaggagatatccatagcaaacgagtcgtagacagtcccgaatccagccgaggcacgaggatggcctctctcgatcgcatggtgtgtatcgaggaccttttcagtcgatcgcaagcttgcggcgaggcgatttttccacgttccgggcatccagtgatcgaggagcctctacgccgactccacaccgagagcacacaggggaacgtcgcccacctcggctcgaagacgtcggtaaggtcgcaccgcatgcaaaaacatccaccgatcccgtgtccatacgcaggattcccgcctttctcagccttgcagctgcccacccttggcgatcacggggtcttggccgcttcacagcgtgagaggagccgggactgacgagcccgggcaggtcggtcgtcttgtccttgtccttgtcgcggacggccccttgaggttttttatcacctcccgctcgtccgccgcctctgccgaaccgcccgctatcgtgcttccctggacaatgatggccctccagattcaggttgggattcaggtccagatcccgatccgaaggcggctcgtgtagcgtggatgacgtgaacgggatggcagatatcacgccccaggtccggtccggtgaggtcgtttcaagaaggggcaagggaataggagagtggacgatgggaaaagaaaaccgacaacgaaaggggcaagagggagatgatatgactcctagtcggacgtaccagcgggaacgttgactccgtacctatgggacgtgcaggcatcgaggtcagctccgatataatccccgggggaccaggttcagggagtgaccgtttgaacccggggaagaagctcaccagtagacgtatcctccggcgattccgagaccgaggctgtggatgagatgacaatcgagttggtcgagggttagtacgcttggctcctcttcaatcgctgaccggccgggctctcgccatggcgcgggagcgacaacgccggggatccaatcgatcgtcctacttacgagacggagaggtcgaggaccaaacgctttcggagctgtaagggtcggggtcgcgggaaagattcgagaggtgagcgaggacgttcccgattacggcgtgggaggaggaatggctaggtgggtgggtcactgtgctcacctttccaacgataggggcgagaggcattttgttcgggctacaatttgttttctcgtttcaaccgggaatgagacgggggagtaatacagagagggtgatatggaaattggatgatggttagatggtgattgacacattcgaattgtgtagcgaatgatgtgttgggtgggtcctctgcatcgggagagagcggacgaaaaggtgagaggactagctactggcgactaggtactggatgatatatccgcggtgctcaaccgagttactagtagctagtagtgtcgctacttgaacgcgcggatgacgatcgccggtagattacgagcaacagccatcatcagatcaaggatcaagacttagctaactgatgataaccaccaaggaatacagtgtagtcacaaagacctggccatctcaacaatcacactccagataacatagtcgactgcactcagtagtatctcccactgcgcccttgttagggtgcggaaactatatctccctcgctcgccccgccgccgtcgatcaccaccaccggacttgcccgaaccaaccatagtggtctttgccacacaaacagttctgccgcgatatcattatgaccggtcgtcccaccagcatcgccgcgctggctttcatcagtctcgtagtactggtctcactctaccacatcgctagccctctatctccatcgaccctgcttcaggaatggtcacagcctactacaggaggaacgggcttcgaacccaagccgaccatcgaccacgccttccgacccatactcgcccatgccgcccatcctcaatcccgcaagatcctgctacacagtcaacccgacactcggctcccctttttcgacgccgccgctaccgacctcgacccatccaccgcgctcctcatgtccacctccccaacccctctctccctccgatcgaccacccagacgctcctccgtcctaaacaccggatcacctcgctcaacctcacccgtacggataggatgaacttcaacaaggggatcgagtgggaagatgtcgaggtcgaggtcccggacgttacggatagggagacgttgaggacgttggccaagatggcgagtaacgcgtacgtcaccccggagagctccgagtggtggggattggacgaatggaacagcgtgagtccccctcctccctgtcgtgtcaggtgggaagacgagaggtagatccggggtggctcatggacgatttcttgacaatacgatcggtggtcgtgctcatagtcgatcccgtttggttgggaaaaggacgccgatgggttacgaggccatgtcgtaagtcccgaccgtcacccccgccctgccatctggtcgctctcctttgctaaatcgatgcgtccttcttcatcgccgtctcacagtttgccaacgatgataattcaaccgtcgtcatctccatcaaagggacctcggccggtctactcggcggaggcggtaataccgccaagaatgacaagtttaacgtgagcatgcatccgtcggtcccccggtccatccccgacctgattgacaagctgaacctacccgacgaggacgtttgtaggacaatctcctcttttcctgttgctgcgcacgggtcgatttcacctggtccaccgtgtgcgactgttatgccgggggttacaagtgtgaaaagacgtgcttggagaacgccgtcatcggggacagcgtgtataccacggtcggcacggtaagtccccccccccgcgtctgcacccttgttgaccgtcgaggcgttgttcgggatcgctaatgcatggatgtatggatcgctgggatcgcttcgtacagaatttgtacaacaacatttcaaacatcttcccggatgccaatatctggatcgtcgggcattcggtaagtgccgccacgtgcgatacactcaagcccagaccctgacaagctgatcctcgaactcgcgttcgatcacgactcgacagctcggaggttccctggcctcgctcatcggactctcattcggcgtccccgtcgtcacgtttgaagctcccggtgacaagatggcagcgcagagattgcacttgcccatgccccccgggatgcccatggacaagatgggaatcacacacgtttacaatacggcggatccgattcccaatggacaatgcgtaggaccttatagtcagtcatggcaagctcgcggcggtctgatacgggtcggctcgtgtgcactgacattgtgactgatgttcaaaaggtggttgttacgctgccggattcgtaagtaccccctgctcatgcagacgtgctcactccctataactgaccttcaaatgtaaacgtcccacaggccatggaagcgcgatgtcatgtggggaaatctatcatttacgataccatgggccgtaaaggctgggcttccgatcttcgcgctcaccggataggcgaaatcatcaaccgggtgctggatgaagattgggacccggcgcccgaggatcaaccggtcgaaccccccgagaagcccgccatcctcgaacgggtcctcaggatcacgctcggcgaacagctctggggttggccgggcaggggattgccggccaagcgcaaggaacccgaacccgaagatgagggcaagcggaggaagaggaacccgaatgccgtgcctcgagcggagaacgaggcggactgcgaggattgtttcaggtggtgagtaagagcgcgtcctgaaacgtcttgcgatgaccgtggagcctttcggctgaccccgctctcgagctatagggagtatggcgatggaatgaaaagggagccgccgacaacgaccgtacagacccaagccgtgttcgctactaatgcagccatctgattgcccgttcatgccctcccgttgtatttaccattatgacccgtggatcgactctcttcagaccccatgtcaagcatatagaagtggccattcgtgcagcccgtgatggctggccgcgtgaggtttcctcatgtgatttctcccttaatcgctgcatagattcacctaatggtcagtctaccagctcccagcgctcttgaacattccagcttgtctcgggcatcgaagaatcttttatataatccaaattaatttccctgacatgctttcattgaatcatgtgtcatgtcacgcttcgcgctggcctggttgcgacttgaaacgccaactccagacgatcgaatgactagtcatatatcaaccttgaaaagaaggacgagatctgtgggtgtcaacctcatggtcgtgctcaacctctttcagggattatatacgagtacgtgtaaaatttccgacgggcaaaggcatagcctagttggggaggtgagagcgatagaaagacaagaagctggaggtgaagccattgtgaccgaacgttgctaaagacccgctctaccgaatttgtacggacgggagaaagacagcgtaaccattggaggccaaactcccaagaggcagtgttactttggtcaacaaaggtcccacagacttcctgatgcctggtgacaagatcgagcgggagctggtgaaagatcgagtgatgagtatgtttgcatgcgaaggggggtccgtcctttctcgccaccaacggccatgatctaagattaatacaacttctgtcgcttccgtcgttatgctttcgtaaggtccggtactggtgctccgttgataccagcccgtattgcgttttatttcatgtgcggcaatgctggcctcgatcggtgtgattgaacttgacttgccaccgatcgtcccgcttgcagctggaatagaacatgaattcctgaacgccgattataatgttcctggcgatcacttttgcttggcgttgaatgcccgctctcgagcatcacgatctgcctgagcagcgtccatagtcttctgctgcctgatctctaatactcgtcgtttgttgaagtattcgacctgaggacaagcgagtctcgatcagctcctggccgaaaagaaacgtatgcccgccgagctactcacccagctcctcgcgcatgctccttcataagcttccctctgttgtgcgcaagctccttgaccacgcggctggtattcaggaggtacattgacgttgttcgcgttgagacattgaaagaactcgtcccgggctgcccagcatgccttgcgatcgtttcgcgatggagcgggtggtggtgtggacattgggggcgattgaagcgtggaatctagaattcagcagtgaactgtaggcttatacaagacggtacgtgctttgtgctttgatacttcgatcctcgattcaacctcaagtaatatgatcgaagagtgagcgggcaggtcgaatcgagaccgagctccccccctaagtgtgacgttatccggcgatcgggttacgcgcgggcgaccaattaaaagcgcgtcagctcatcaaccacccacccacctcaccccctctttgaggtgttagcgtcatcgagagcccccctcacagcttccctttaacgtatccatcgacatccctttacctgttccagcgtacctatagaaccccccgaaacatctctttgctagctactacgaagcaccgcccaagatcacacttgaatgacgaatatggagtccgattctcaacagaattggaggttttgtcagtgtttcggggacaaggcagaggttagttcagaacggtcctcgattcggacatgacatccggtctcggtctgcgtcgatcatggctgacgctagactgtatgacgttgcgtctcttgtgaaattccaggatggcgatatcacagagggtgagtcggaagcagcacgccggataggctcggcgaacgttgtgcttggagctaaccattgttttgaccaatcccttcccgatcgacctcgaacaatcgcgatgcacgaccgtcttggcacaacgctacagctgatatcatctccactgtcgagtttgaccacactggtgattacctggcaactggagacaagggtggacgtgtggtgttgttcgagaggaacgaatcggtaaggcctgacgttagctccattaactcggagttcggaacgctaaagggtgtctaccacgcattggcttgatgtttccggctccgaatagaaaaagggatgcgaatacaagttctacacagaggtaggcatcagtcgagtaggaacgcgactgggatcaagcgtctgatcagtcatcgctctgttctacccgcatcacgcgtttccgtttcacgtcgatcagtttcaatcgcacgagcccgaattcgactacctcaaatcgctagaaatcgaagagaagatcaacaggatcaagtggtgcaagcgacagaaccaggcccacttcttgcttagtaccaatggtcagtcacgttgcacactagcagacgcacaatacgatagctcgctcaacctcggcctcattgcgtcaccgtttcagacaagacaatcaagctatggaaggtctttgagaagcagatcaagatcgttgccgaaaacaacatgtcggacgggtaccgaccgcaagtcgggccgatccccggtgtgacgccgacacagcttcgactgccacgaatggtacctcacgagaacattgtcgctgcggtacctcggaaagtgtacgccaatgcacatgcgtaccacatcaactcgatctctatcaactcggatggagagacctacatctcggcggacgatttgcgactaaacttgtggaacctgggaattagcgatcagagtttcagtacgtcgttttgggctcaggctagcggaaaagacaagtcgagcgaggaccgatgattgaccttgacccacatgcgccatccagacattgtcgacatcaagcccgtcaacatggaggagttgaccgaggtcatcaccgccgccgagttccacccgataaactgcaacaactttatgtactccagctcaaagggtaccatcaagcttgcagatatgagggctcgggctttgtgcgatgatcatgcgaagcgtgagtgcggtggtcccttcgctgacagataacttgtctcatacgcgtttcgaaatctgcagtattcgaggaggacgaggacccaacgaacaagtcattcttctccgagatcatctcgtccatctcggacgtcaaattttccaaagacggtaaccagattctgtctcgagattacttgactctgaagatctgggacgtccggaacgagaagcagccggtcaggaagatcaacatccacgagcatctgaagcagaagctgtgcgacctttacgagaacgattgcatctttgacaagttcgagtgcacgttcagtggttcgggagagtgagtagaacggcctatagtctcgtcacaccttggtccggggacatatctgaccgcctggcatcccgcgattttgcagccaagtattgacgggatcgtaccacaactacttccgtatatatgacgttatggagagcggcgagaaggatacggtcttgcaagcggacaagtcggctttcaaggccaagaagattggaggccccaagaatgcccagaagggtgcgccaggagcgaccggaaagaaggacggcttgcagacagaaggcatcgatttcgccaagaaaatcgtgagtctaacgatgcgggctgtctcatcagacgcggcgctaagtatgtcgcacgacctcttcaatcttgcagctacacggcagttggcacccacaggaaaacaccatcgctgtgagtttcgtttgctttagctctgaacacgtgcctggactgatccggcacatccccaacctagattgctgctacgaacaacctgttaggctgcttaccatcgtccagctcacattgcaatgaactgacgccatgtctttgttcacttcgacaggttcttgtattcgacccaatcctagggatcacttcacggccagcaactccccttacgaccatctccgcttctcgttccatctttttttcgtttccgatcgatcaatctgtcatcagccgggcagccccggaacggtcgagcgcatcttctaccccttgctccttcgataccctccgtcgcgcgaccgaacaaacacatcatcttctctcatccgacgacccatgctttaataatctcctcaatatgttggccacggtcatcaccatcgtcgccatcgcctttgtccgacctcacgaacgcctttcacacacattacaaaaaaaactcgataccagaaaaacaacaccgacagggcggaaagcgagtcgacgcaccgttctcgtacctcgcgacggccttttcgaggcaaagcgggcggcgttcaaggcatgacgatgtgcgatggatggatggtctgatcgcgcccagcgaaggtggacgtttcgaaagtagtgatagtgaaaagcaccaggaattgaaacgtatggatcatgagcctatagaagtagccgaacaatctgtttctccttgcaacttgttctactcttttcaaagacgatgtaccaacagcaagctattcgaaacccatgacacgagcagctcggtcgcggaagcaaaattcgttccggcctgaaataacgaaatcaaaacaaaccagagcgggatcaccgggttgtcagctaggaacctcgtcccaacattcatcagctcgacagtatcctggttcctgttgtcgtcgcttctcttgtccagaccgtatcatctacaaggttgctctgagagatcaatcgtacgacctagttcggcgactcatcgtcggtcttctcacgagtctcggtgcggtattcggctccgtaattgctagagcatcaatcaacatttattggagctgtcaacaaatctccgataaccagaaatcgatcatcgagaccttgaactatcattgcaaacgtcacaactcatcatccggaaattacactacgacacgaattctatagccatggagatcgacgcccgtttcgctactccccgtcggaagaaggcaggaggaaacatgagcgccgtcaatgcattcttgatggaatgcgcagcgtcaccagattcgccgtttcctgcaacaacgttgtccgctgcgtcaaggcagatggctccgctgccaagaagcagaagagctagtgatggagaagttgtgggtgaggaaatggacatgctgcatactccaccgtctctggcacgcaagggcgatctcctgaaagaagacgatcgagcgcacggtcctacgccgccctcaaatggtagcgtttacagcaacgcctcgaggacgtcttacaactccatgtcatccaagtcctccaatctcttgacggattcgtcgacattggcttctggtggcagcacggcccgcaccccagatacggggggacaggattcagccggcggacacgatccgggacgaaagctttacgggtctggtttgggaaagggaggcccttctagagctttcggccgaacggcttcggcacctgtgggaaaggctgtatcgcacatgcgggattacgaaggcaagatgttggtcaaggaggatctcgtcgagatcgttggcaacggaagtccctcagctgaatcaagcagaagagatgaggtacgtggacgcaagcgctcctctaccttactcaactaacatccctttacgactctaccccttcagagcggaaacatctcgactacagtgacgctttcggcagtcgcttcacgaccaactttacatcacacctcttcagcttcatccttaacctcgactagcacagcggataaagccgaggcgtacaagacacctaaccttacttcacgctatcagacggcccgttcaacagaccggacaaagctgctcagtcgatcgacgctgaaaggtttcggaggtccagtcaagcggtccaaggctgtcttgcagtccgaagaggaggatactgagcagcaggactcgcctggcttgctagagcttaacgaggaacgcgaattgaagcgatcggatggcgcagttccggctttgcgctctactaccccttacggtgatccaccggctcatgatttcatgtccctggcgagaatctcgcctcctcgttcaacaacgccgctcgacaggattcccactttgcctcctgccgagtctagctcttctgctcgccatcgaatgagtccgccaagaagaatgttgaacagcattccggacaccatactcgaagctgccgaggctccaccttcgcgaggactatatctcgacgcacgtcagcaggatgctagatcagtacaaacccggtcaacatcggtctctcccgatgccaatggcgcttctcgagctgccaattctctcgctcgtcatcggcattctccaagcgttccggttggcaccagctatggagatcccgagaaggaaaaccgctttcccgccagccagatgatggagaaggcaacgaacgaacattcggtagcgctgcaaactccagcagttcagcaatacggttctcgcgaagcactcggtcatcagagccgaactcctgagtacgatccacgcaccttcgcaagggagatttcggtacagaatgtcgacccttcgcgaacatctacgctacgagccgaaccagtcgatgtgtccgctgccagtagttcgactgttaccccaagagcgatgcacaactacgctccacctcatcccgagccacaggagatgcaattgaaccaccctgacccttacggggcacctcattcggtcgtgccaatgtacatgacgccagcccagaccggtccgctgcggcaagctaccgattacaacgccctgcaagccaaccgcacagcaccggccgtgccgccccaaaactactataccgacatggcaacagccacaccagcgtcgactttgccgccaggccggaaagggctgatcgtgagtgtgcaagttttctatatcagcaatgtcttggctaaagtcttcttgaaatccagtttaatggcaaagaatacgagcgaattagcctgcttggaaaaggcggatcatcaaaagtctactctgttcttgagccgggaaatcgaaagatctttgccttgaagcgggtgcaactggatcgatcagacccggaaaccatcaccaattatctcaacgagattgatctgctcaagcgacttagcggccatgaccgaatcatccaattgattgatcatagcatcagctacacgccaagcggacggccaaagattttacaaatggtacatacgcactcgagcagccgacgagctacagctcatcgactgtcacttccttgtagatgatggaacttggagagaccgacttcgctgcgcttctggagaaccagagggaaaagcctttgaatatgaactttgtggcattgtattggcagcaggtaaattcgcgaccctgaatgactccgttgagagcgtgctaaactgatgctacctattgacgcagatgctagaagccgtgcaagccgtgcatgaccagaatgtcgttcatacggatctgaagccggccaatttcgtcttggtcaaagggaagctcaagatcatcgactttggcatcgcgaaagccatcgcaaacgataccgtcaacattcatcgggacactcaagtaaaggaaaagtttcacctctgagtagagctcaaagctgactgcccatctatccagattggtaccgtcaactacatgtcgccggaagccatcttgaaaatgagcaatgccaaagtacacaaggtaagctagggcaactgcaagacttgaggcgaacggggactacaatgccttatctttgttcagctctcgttctcgagcgacgtatggtctctcggatgcatcctctaccagatgatatacggaagccccccattccagggcatcaccggcggcccgctcgtcaagatgcaagtaatcggttcagggacttttgatatcccttacccagcatccgtgacggcagctcggaaacacagcgaagaaccggcttctccgggtaccgctccagtcgttatccctagcgaagccattgatacgattcagagctgtctggcacatcggcgtgaagaccgtttggctataccctctttgcttgagcatgtcttcctcaagccaaaacctggtagttgtgagttaccgcttcaataatcgtccgttagtctgtcgatgatactgatgctgggtactacatagcgacctcttcgcccgtccgattaccaccagactggagtgcgatctccaagcagaatatgacgcagttggtcaaatacgtcatctcttctgctgggcaacgtcaatgtcaagaattgggtgaagaaggcctagcaaatgtcagtaattggggatgattaatattcaagggatgactactgattgcgacccatttgccagttccttttccaagacctccggcgtaatatcaatctcgaggcgctcggacttcgcagatgatagaaatggcaccttgcgcttcagcttctggacctccttgatttcgctcacaacactgccacgcatcattcacgccaagtttcaaggttgtaaaatctcctcgttgagacctcacgtctatataatatcgccacttgtatcacaagacaggatgactgtattcaagggattctcatctaagtggcagaggcgacagccgtgactgatggagcgggatcgatctgtcgcttggggtccatgaaggccatcaagagctcctcggtaaccgcggatctccgctagaagtgagagacaggataagcgagggccacatcatcgcagtgacggattgcacaaacctcttggaaggtcttgacctcgtcttgtagcttcttgatgcacatcgctttgagctggccagtcaagagagttccagcgcggtagtcctgcgaatgtcgatgctggttagcgctgcatggatatccttatggagctttacgcacggcggcagtcttggcaagaagctcgtcatcttcctcgtagaaagacaagtactggaaagcaacgtcgacatcggggtttccaccattttgacggtgaagctcctcggtatcgccacctcccgaaaatccatgtcggttgatcttgttcttgatctggttaggggtatccgtcatgtagatcgcagaattggggtccgaggcggacatcttggtctgagcaccctggagcgctggcaagaatttgcagtgcaagagacatggcttggggtatttgagcttgtgcgcgacgtctcgagtaagtcggaactggtgatgcctcagcaggtcagatcagcaatctatatctatcgaggcaagcagacgcgcggatttgctcacgtaagggtcctgatcaatggcacaaggaatcagacagggaatgtcgtgcttctcgccgaagatctgggggaaggagttcgagaacgaaggagctgcttggacggcgacgaaatggtatttgccgatgttgtcgctgtcgccgggcaatgcgatgcgtgatcagatcgataagctgtgaatctcatacgacatgaacctatacttacgagtcgttgaagccaaaggttcccttgctctggttgtgaggaatagcccgagcgatcttcaggatgtttcggtagaaagcaccgctgaagttgtacccacgaagtcagatcaggtgctcccttaactcgatatgaagccttgctcacccgacgtaatcaagatcggagaagataaatgtcttcttcaggtcaaagccacaggcgataatgtctttggcgttttcgtaagcgaacttgtgaacctcgtccagcttgagctggggcttcattaagaatttctcgtcgtctgaaaaagggagatcttgattagctcgagcaactaccaaggcgacttcggcatgctgtgcttaccggtcaactgaatgaccaatgggcagtcaaagaccttctgcaaccagctaccgaatacatacgcagggatcagggatgactcgttgcaaaaaagcgcccaatttgttcacttacgcggtgaaagagaacgggatctggtgacccatatgcatcgatccgctggaaggtccacgacccgtgtacaggtagaatggctttccttgctcgaatcgatcgaggatgatgttcaggtctctaagcaatggtaggcaagatcatgacgatcagtcagttgaggcacattcacgcatatctagtaccgactgctcacctgtgtgagaagaaggtctctcgacgcaacagacgatgggctcggtgtccagtcagacgctcgaatctctccaacagctcagaggtaattcggcgagttccaaaggtctcgatgagcttgtcgtagttgctgcggaatacgagatcgtgagctggtggagtgactaccgatcggttgagtaaatcttacatctcaagtgccttgccgtccgcactgatctctccctggacgtcccaaggagtgaccagctgggccgcaggcttggcaggggcgtccgtggtgacgggagccggagccttcgagggagctgccacctcagacttaacactgaagccgcgttatattccgcgtcagtgatcaacgctgcagggctgctgcgaggatctgtaacttactcggtagagctcttgctctcctcgaagacgctacccagactgggttgacttttgcgatgaccccgagcgaagctagcggtaccgtccatcacagggctggtgatcccaacgacgcttcccctcctgacagcttcgggaatttcatactcggtgtcgagcttgacattgtcccagtcggcggcatccacacctcctttactctcgccggcccctccaaagatacgttcaggttgggggaaatccatacccgcccacttggtcgagagctgctctgaggcatctccgcgccttccatccacctgctggattctctccggagtgggaaagtccatgttggcgagcttggcggaaagctgctcagatacggattcccgacgtctgtttgcgacagattgtccaatccgctccggatcaggcagtcgcatcttcgagagctccttcatgacgtcgtcagcattgctctgcctgcgagcgtgaccagatccttgagcgggtcgagtggcaggttcctgcttgctttggtgggcattctgggaggggaatgcgaatcctgtaggctcgggtaggtcgagttcagagaactgggttgcaatcttgttgggcgtcaactggccagatgtgagagcttcctcaggaggaacaagagagttagacattgtgaataacggaatgtatgctactatataccgtcttaaagttgctgtgaagagcgggttgaagcggctacctggtgtgtaagcagaaggttatagtttgattggaatctgtgaggtggttggtagtcgaccggttggacggttgctcccgcgttgcgtgggaagcgcgcagactcggtagatggaaggcagaatagacacagttgtagtggtagcatgaaatcgcatagggcacaatgctcattccgaacgaagcctatcatacatgagcattgtcttttcataaggaagatcttcaaatgagacctcctcctgagaggcgacaatctgcgcacagatcgcagacaagacacgggatgtattcgcctcggccaaaaagaggtcgccagaaaacgcaaaaagatatacaatagcccggaatcgaaccgagtgctagccgatggcaacggctaatgttaccactacaccactattgtatttgatgttagcaacactgcaacaataatacaatcaactgaaatctttgcacccactgtccgaatcgatggcttttcatcctctctgctttccatcgatatctacagccatactcatgccgcatttgagagcccgctaccatagatatccctgccaagatcttgacaactaccgatctagcaccatcagcgcttatctgaatgcgatcgagtatacttttagcgggatagcactatcgtttaaatatgggaaccgtacaatatatatacggtccaaatcatcatctgcatcgcccgatcatacaccatgacgccctggcttgattacacctggcttgatctgctgcatttcacttctacaggatttacctggtcatgccggatcgcacgggcacctctatctgttcgaacgtcgcaacacttcctccacctcacgttgcgccaagccattcggcgccgtcctctttagttctctacgaaaattaatggcagaggtgagctcttgattactttatcgcaaagccaggttcgttatacttgctctaatctggttctatcgcccctctccttgcactgttctcagaagcgttattagcaccagagacccagatatgtgtggctgctacatacttcattcgccgctcgtccccagtcgtcacattgcaaaaaaagatcaatccgccgtttgacgtcgcatcgagcaacgaagtttgctgctcgcgcctgctctcccttttcgagcaattgcatctggataaaggcgcctgtcagacaacttgcatacgaaagcacgacgtgtaacactcacgacgaatggctcgtagcctattgggctcttcttgctctttgcgaagacgtccagagcttcccaatctttcaattccacgagggctttgagtttgacccaccaccagctaaggaatgccgtgtaatcgaagtcaagtcgacaaggtgctcgtcaatttaatagatcgggcaatccttaccgtttatcagaaatcctccaatcactccgcagcttttccgctcgcttgcccagtccgatgcgtagtagttccgacattgtatcgttcaggctgagtcctactaatttatagcggttctccaggtctctttccattgtttgttgttgtgtcagcagcttttgtgcctcgtcggacagctgcaattcaatgacagtgaatcatcccgtcgtcaatagctgttcgacaatcgatgactcaccttcgcttctaatgtacgtgatttatcttcgctcaaatacttcacggccgcgttcaggttgaccaatctctcgttgacgtcctgagtacgcatccaaatcaggagattagacatctacctcggttcgaacgctgctacatacctccttcgcccagccctcttctagctctagcagagcattgtcgagacggcgatcgtcttggtagtaaagatcccgcaatagatctcgatcgttctctttggcatagacctggagcagacgaactgccggtgcaagttggggcgatccatcatcaacgagcgagaaaaagtcgccaggcgtatggcgactccgcaggttgagcagtacatggaaaacgagatcgggatcattcgatttgacagcttttgtgagagctaggcggtcttctttcattgcaagaagaagaggtacctgctcagcagcttgacgttcatgctcaagtagctgacaggaacttgtgagccgaagtaccctggatttgcatctgacagacatacctttgttgccagacgagttcgaccaacttgccaagcgcgcttcgcgatgtccgcatagctgacagacataccctccttttcgaactttttcacgatgacccgtctaagatcatcatcctgagttgcggtattttcgccgcctaatgattgcgctgccgctatcttagcgcatgcccaatgtttcaatactggatcaggtcgaagttccaggtaggacgatatccgtagggccaaaaggtgcatgttacgtgcagtcagtctcgacacgaggcgctctggtggaaccgccatatacctgagcgcttcaagcatcagacctagctacttcaattttcaggctttgcactgactgttgataagtgatgggaatccctacttcgtgaaaacgaacagcgttcagtacccgtaatgactggcccatgttgactagatctgtaggattgtacaggtccaggaacgctcgcccaaaggtcgctgtctagctcgcccaaagacgaaagaaggcacggttgacccggatgtcccttctcgtcgacattggatagcactcaccttgagtagcttcttctgccacgttgcatccatttccatcccagcggcttccacacaggtgtcgacggcatcagcaaggtccgtcttgatgcttcgaaccgcttcatctgccttcggagatttcctgtcaaattgctccattgcatcatacaaaatagcagcaggactactggagcctggctgaaatactgatagagtaggagctgaaggacagggtgtatgagcgctagattcggggggaggccgcaaccgactcacctggcactttctggacgaaatccgacagtgatgcactgacgatccgcaacccatcgatctcgcctaccaggacggacccaggcgtatatgtataactgcgagataaatcttcagtgagaatcctggtccactatatgactgaaatggcttacctgagctcatcaccgcccggtcccaccacgatagccctgccatctcgccagcccagcaccacggcgtgatccccacaccactgtatatcgttaggggagctggcatcgtgattgccttccaacgaactgatatcgacctccgaaaggttccgactgaagtccgaggacaccacccagagcgacagactcgcggtaatgaaagcaagaaacttcccattcggggacattcggaatgaggtgaaaggtccgcgggccagacgctagcaatagcagcgatttgggtattaagccttaagatttccaccaccggtccctgcaaacttacttgatccacgctatcaagctcgtcaacggatagaatggtgtcccggacggaaaccaggacttcgacgtgacctgacatggattgatctggtggtactagcaaccatgacctaggggcgtcctgtaaaccttttgaatgtatcatcaggacgccagtactcagctcatgacctcaatgagactcactagcgcttgccaaagcagtcggtcgaccgccctcccaccctttgacttgcacaaaattgagatctcctaatagcgctacgaagccagtgtcatggatgcgggcactcatgacacccaggctatcgacatcactgccgagagtatattgcttgtaatcccctgccaagtcgtagatacgatataccccactctcggctaaaacgaccaggctctcctgaggggtccaatcaaagaagacgggtgctggcagatcccactggaacgacttacgcaggtcagcggtggcttggagatcgggaatttcgagctagtctcaccgttaacgtgactattggatatccagctgcagtatagacgtctatcttaggctttccagcaacatgtctcccagccaacacgatcttgttctcgtcgcgcatcatggctagggtagaagagtgctcaacttcaattgctatgcgtgttgaacgcgcaccacggctcaccaataggccctccgtaacgcgctgcagccacatgataatcagacaagtcggcgatattccatgccatggaatagacttcctcctttctgtagaaaacatcctcaagggtatcccagctgtacgaccgagcgtgcatgctaagtgtcagtaatctagcaggcgaggccgggcagatccgagccttacttgtccgtcggcgagctcatgttgtccatgtctatcacgttaccgtgagtgacttctggtagagcgatatagaccgagacaatgtgccaagaacgaattcccaaagggcgaaggtggagtacggatagtttcctgttgtcaccattcggagcggtcaagagcactcagatcaagcttgatcaagaggtatgagaaatcgacctggagatgaccgcatctccgatatttgcttccgttgaccgatgccggaagctgatcgttagaaggagacgagccagactcatctgctgctctccttagacgttgcctcttcaacaataccctcctataccttggtatgtccatacggacatctaatagcaggccgctttttgaatcagctgtcaatcatggccactcgggttccaccttccaccacgccattgtctgcggaagagaagccagtattgtcgaaggacttggctcgcccagcagactacaaaaaagtcctcaaggtgagcacacgctgaccctgccgttttacacctgcagcagatatctgaactttgggtcttctcattctgcttacagaatcgtgctgcatcaaagatgaccgatccgtgccaggctgctgccaaggcatctcaagactgcatggataaggccaattacaatcgagatgaggtatgcctggcaatacgagtttgtgcgaaacccaccgctgatgaccctatcttcagtgcctaacgttcttccaagcttatcgcgactgcaaaggcaaatgggtgagtttattcaaaaggaatgaaaagtgcaggtcattgcctgcgctgacttgaacgatcgtacacctgacaatacagctcagtcaacggcgagaggaccgacgagcggggaactactaggcacaccgttatactcaggcctttgcgcaccacctcggtctcgcatggtatcgtggtcattaagcattaagagttcgtgtaattgtacaagcaaggtcagacccttcacaaggaaggcttcacacggcccacaggcgtcgatcctatcaagccatcatttccgttctgagatcgtccgaggaagagatcgctaggacctcgtagtcttcagtgggagtgcgactgttcttgcgtcggagaagaccgcggagccggcctgggcccctgttgtccaccaaagtcctggcagcgttggcgaagaagtctcgagtatcgtctgcaagctcgtgtaaaccgagaacgatacctcccgcttcgacactttggccgggcatcacggaactggacggacgtcgccaccactgtcaggtaataagacaaaggtaataagcatcaaatccggtcggcatatactatcgacctacttacccttagcattaaggacgagcctacgacagaaacactcgagaatgccatggcgaaagcggccatcattgggtgcaaatgccagccccaagggaggaagacacccatggcaagtgggatcattaagatgttgtaacagcatgcccagagtagattgaccttgatctttgtaaagattgtgcgtccgagatccagcgccgcaacgacatcgagcaggtcagatcgcatcagaacaatgtctgccgcttcgatggcgaccgacgtcccggtggagagggcgatgctaagggatgccgcgacaagggcgggagagtcattgataccgtcgccaaccatagcgactccaccgttgtcgcgctccataagatccgtaatgattttggcctttcctttgggacttgcccctgcgtacacctcgctttcgtctactccgacctctcgggccatggcgagtgctgtctctttggcgtcaccggtaagcatcgtgaccttgatccccatttctctaagggagcgaatggcagtaatagaggaaggctttgctgaatccgtcagtgagatcgccataacgggcacggcaattgccgagcggtctcgtcctgccaaatcaaccggcagcagcgacacaaagacgaccgtccttgcccgccccatttgctgcttttcgaacgtttccaattgctgtgggaagccatcgaacttggccttttcactatcatcaccgtccagccctgcaacgtagctcttcttgcccacccggattctcgcttcacctcggccgtttgcgaggcgtacgacggcttccagaccttgaccggttccgctgacaaagtcgacgacctctccgtctggcgcagccaacccagcttccaggagcatatcacgtccatacatggcgatggcgagagcaagcggatgctccgagcgagcctctgcgagagcaagcagcgaaagtacgacgtatcgctgtgtgtgggagtccgcagtggtgtggctcaaggtcgctgccgagtccagctcgtcatcagatcggcccgagaggggcggtcgaacaccgactgtgagactattggacggcagccaattgaccgagacgaccttcatgcgaccttcggtgacagtgccggtcttgtcgagaacgattctcctaacatccttacaagcttcaagcgctttgccccccttgatcaggataccgttcctcgctccgacaccggtcccaaccattatagccgtaggtgtgctcaggcctaatgcgcatgggcatgcgaccacgatgacggatatgcacaacttgagacagactgagagttttgtagcgcctggcgtagtgaagatgccgggcaagcttgacgcgttagatcgatgcgaaacaatcatccagatgatgaaggtgatcaatgataacgatatgacgatggggacaaagattcccgccacccgatctgcgaaatcctggatgggggccttgctggtttgagcctcttccacaagcttgacgatctgcgacagtgcggtatcctttccagctcgagtgacctcgatattgatggttccaagtccattgacagtgcctccgatgacgagtgagccgagattctttgaaatagggatagcctctccagtgaccatactctcatcgacggacgatgaccctgagacgacttcgccatcggcggggatcttctctccagggacaagcaagacgacgtcgccaacttgcagaagctcagtcgggattttcctcgtctcgccacccgcctcaccggctcgcccggtggcaggatcgatgaagatggttgccgaagacggggtcaaggacatcaggtcggtcaatgcggcggatgtcttgccctttgccatgttctcgatgtatcgaccgagagacacgaagcagacaagcattgtgcttgtgtcgaaaaagacctgaggacggtaggaatcgtccgcgttgaacattgctgcgaacatggcgaagatcgaataggcgaatgcagaggacgttcccatgacaacaagaacgtccatggtcgccgagcggtgcttcaagctcttccaggcgctccggtagaaacgacgagcaagcccgaactgcacaggtagcgtcaagagaagagccaccacatcgccgaggtaaatgcccctgcacagcttcgtcatagtccagcccatgagccagtgtggtagccacatagccatcatgctgacgacaaagacaggtacggcgaatagcacgctcaaccagaacgtccttcgccataccgagatctcgtgaaccttttggagcgaggcaagctgagcgtcatcggatgacgaggccgaaggcaggacagtgatgttggggtagcttttcgccagggaatcgacgatcaggcgaaggctgacgagagttggggaatgtaccagcgagatgtgctcgaaaggatagaggaaagtgacgctttccacgccagcaagagtagagatgtattgcgacacggaggtcgcctgagtctcgttttcgagtctgaacacaggatactcatcagtccgaggatacaatcaggtcatttgcatcgatcacttacccatataccctgagctccacagtttggctctgtcccctttcaacgacctccgaatcaaacccgcagtcctcgatctcttcggcgactcgagcagagtcccatcgagtaccgtcttccgccacaaagtcctcgtcatattcgacgactccccgctcggcgagtaacgcaacttgaaccgatatgatccccggttgagctgtaagcatcgattcaatggacgccacacaggctccgcactgttcatcagagataaagagcgtcagactcgatccccggcaagttcagtaatagactgacggtcatgcccgcgatccgcaattcaacctttcgcacccgcttgccggccttgatgatcaatccatcatcaccgccctcggtcccgtccttcgccttcatcagaccctccatgtcttcgaacacagcgccatcctcgtcatactggctcataccctggtgtttcgaacgactaccggagccgagccgaggtgtaccgttgagcaggggcgaccgcatgccctcgaaggcattggtaatggactgcaccacggattgcatgtcggaatgatcgtgaggttgtgatcactgtagtttttggccgtttgatgtttattcgaacgtagtccccgattaacgttacaagcagctggtctgggggcgtttcgcagacgaccaatatctgataacgacgctgcgtcgctctcgaaaaagacaacaggccggctgtaatcctcgttcaaataatagcgccgctcacagcgagaataagctccacccgaacggttccgagctgggaatagcaattggtggcgaaggtaaaggtagaagaagcgtcgaccagcgagctaattgtagttgagagacacaaagagactcctttcttgcagttcggggttgaaaaggacgagtcgtaggtagtggcgatgggaatgtcgtgatggatatatgtgtacatgtgtgatcaaacgtcctttaactcgtagtcatcgagcgactcgagctaggaagcgagatctagcgggaggcatcaaggggcagagcaatgtctcggcataagtgaagggggtgtggggcagacttgatccgacgcgggaaaaaggattcgctcgacgagagataaaaacgcaaaaagatatacaatagcccggaatcgaaccgagtgctagccgatggcaacggctaatgttaccactacaccactattgtttggatgtttaggttcgtgactgtaacaatatattgttgtagtcacgcgtctgcctcgaatccgctttactcgagtctcaccagagatcttgtctcaattggatcctgatcactttggataatcacgaaagtacagacgactattacaagtacacaggtcatggcggcaccgcgactaggaagacttagattcggttctaggtggagtcccctgctcgatcttgttcaaggagattgcgctctcgatgccactgtgaacctccagcatgttgagctggggtgtgggaagcaatatcagtggcgcggtaagtgcgtcctaacggaacgtatatactcacgcgcttgaacaagaaagaagagaagaagcaagcacatgctatattcacgaagggatcagtgcagtgttttaaaagtttagaccgagctaggcttacccaaggcgatgctaacaatccagaccttgttcaaagcgtcgctgtacagctggatgaccgcggattgcatttccgttggcaatgcgcgtatcgcacctggactgctcaagatggaattgatgaggccgtcgctcaggtagccggtgtgtttcaatgccaatttcaactgactgtgtgtcagcatgacgagatcagtcgcatcgagcggcctggtctcaccttgttctcgaaaaggttggtcgctacggtaatccctacaatccggccaatgaagccgaaccaattctgtactgtagtcgcgtgaggttccaagccgggccgagtcgcatagtctgcttgtacgatcacgatcatgatgttgaggacagctccaactccaacaccagcgataatttggtatccgatgatcttcgccgtactcgtttcaggcgatagggtgtagaataatccacaagctactgccgacaaaatgcccccgaaagggatgcttggccagaggtgaccctttctctcggcaatcttgctgacaatgacgatcgtcggacacatggccagttgcagcgcgaggagcaactgcgagaacttggtttgagttcggagaatagtatcgaaacatgcactaatggctcactattccgctctttgtggctgttttactgttgagaaagacatcttatcaacgcgtatgaaagcgaggtgattcgtcctcaagacctaccccttcaccgcttgaaagtagatcgacaagtagtagagagcgataacaaccactccatagcctttagcagaaggaactatcagcgttccgtcggatcttgttctctatccgcccaatctcaccaaagaacgagaccagaactcctcccctgaacggcaatagggaacgattcagctatatttcttttgatgcatgaccaagtatggggacttaccaaagatgcctggatcggaacaaggggattggcaacatggcccgtggtcctagccacatcgaccagccgatgaagatgatcagaaggaccgatgctagaaccagaagctggcgatgcagacactgttagcgctgtagtcagtgatcgttgctgaacacccgcgacctaccgccaacactggtgcgctgttccacttcttggtgaccccaccccattgaagggagatggcaaaacacgtgacccatccgatgcacaacaacgctccgatccagtccatccttgcgatcctttgaaatttgctgctgcgatcgaccttgccatcaaacggtaacatggtctcgcctttcggcatcgtccacatcagaacgggaagcatagcgcctgtttagccgaaacgatgagcaagtccctcaaaatcgtacactacaagcggaatgcgcacctccaatagggatcgaaatgtagaagcacctgtgatacaagatctcacgtcaacagagcgtttattgcggagacgatagaaattgttgagaccgaccatctccaaccgttctctcccatgtcagtgaatgcacctatgccagaagattgttaagggatttgtgacggtctgcctgcgaaacggtacttgcctccaattacgggacctcctaccgacgccaacaagtagacgagaccatacaatccgaatagagcgggccgcttcaccagtgggatgatctgcccagcaatgatgtaggaggctgcccataagcccgcgcctattgatgcgacatagaccgtccattatcagtataagcgagagggtaagaagagcaaggaacttgcctcccaatccggctacagctcgtccaacaatcagcttctgcagtttaagagattgtaaatgatcatacgacgctaccgcaacacgaaaacttacattcatgctcgtagcagcaccctgatattcgtaacgcaacatataagctcagcgcctcacaatctgccacgatcgcatgacgacctacgcatatagcgcaaccgacgagaaagatcaagcaacatccaagatatacgagcttaggccggataatcgtcatcagctgggtgaaccaacaaatgaacccgctgcagctgataaagaaggcgctgttcagccatgcgagcttttcaccttcctcgactgagggtagtaagcggatacgcatcagcgaccagcacgaaacggacagcagcgttgaaagtccactcacatctgttcaagagctgaggtacagcggaagtgataatgaactgatccaaagcgaataaaaagatgtagatgctatcgagcagagatcagagatagctttcaatcagaccgccatatgcaggaacccaccataggcccaagaagcaaaacttgaattttggatctgtggtatgatctatcgtcccgttgtgtgactctcggtcaccgacattattattgtcgtccaatccgacttcctcaaaatcttgtttacccatcaggtggtgatctgtgtgccaagtcccgtgcgagcggaatgagtctgctttgggagaatcgctcgacctgcgagcgttttgcgattcctgattgttgaacatagcgacaagggggtatgaggtgcttatatacgtgaacgacaaccgggtaaggtttacccgtcgtttgtttgtctacgtatccgagacagctgtacgatccatagaaaccttatgtacgcgcggcaagagggcgcgttgtatgtttgccttctaacgctcgatgcctttccattcagctggctccctttggtaggaagggcgaagggtcctccactcagggctttggaatcgaagtgggtttggccgaatctcagaacgccatcaaaggggctaaaggaggccgacgatctccacgcggtaccacagaaggtgtttcatcaacctaaaggtgacccgcgcgtgcgctccgcagtccggccgaaggatcgggcgaccctacgttgatccgttctctgcaatcaatcgaggtcaccgtttcgcaaaataaagctcatcatcttgcccctcaatgataatccgagatttcgagtgccgcccatcgtgtggcccccgttctaacctcgcgatgaccccgttgctgccgtcgctaatcggactgcgatgctttgtttcagcatatcgcctgaatcaaacaaggacgaaagtgatcaagtctcggtttccacaagcagcaaatgacgtatacgagacatctgattggcagccggatggcatgctgtcgaaacgctgttaacgcttgagttgaaatatcgcctaagaagcgcagtgagggtactaggtacgtcatcggagattgatagaagatttcagaatgccgcgtgcagaaatcgtcaaagacaggatcgaagggggctgattttgaggcgagatgtaggatcctaggtagtcaaactccacggacatgagcacgagatgagactattcgtcaccccgagactcttagggcatacgctccaaaagcccatcatgtctgtcttccccgtggagatcatagccagacccgcccttgcaagcgtttgggggtagacttcagcaatgtttgcgaagacagcgtcactgtcacgagcaaggtcggagctatatgaggaaaattagacgttaaggtgcttaacaaatttctgggatatagtcgtgcatgacagcctcgccaacccggttggcgagtctatgaggcaatgatcaccctaccctgacagtcacagggaactcgcgccaatcaaggtcatggccttgacatattccgcctgtcaagatcttgccacggacggaagacgactttctagccgggtcactcccagtaaggatgctacctacaactgaccttttagtgtgctgaggaccaggtatttgctcgctttgggtatcatgttgcaatgcgtaggtcagcctctttgggccaatcatgaaaacaatttgacgagacggaatcgcgcttcaacaggtgtcagtcgagttccagcagtctattactcacttcgatgcaagaacagttcgcgtcctttccggtgtatacgatacaatccgcagtatggttaagaacgttgagggtgttgtgatttaaccacattactttgataagcagtctgtatgtcttctctaagcatgaattcttcgcacgaagtccgccgtcttatcactaaaaagatacatctctgtgtgactgtgataccacggctgtaccggcaatgccccgggcaactttcttgcggacgatgttttgtacacgcgccctaatggcgctccgatgttggcaatgagtggccgatgggttgaccggaaccgaagaaagaccgaaaaggtggcgatgccgaaaacgttcctaaggtattgatcagtctgatttatgaagtctagtcccattacccgcgcagctgggcgtaccattaccaagcactagacggctctcccccaccccagaaaacaactgttgaacagccctctcaatcaaaggagacagtcacaagcgacgatacttcatacaaccaacgtagaagctaaattgtacaactacgaccatcgtcacagtcatcatgagaacaagcccgatccggatccgcatgacacttgatctaggctcctacgcccagcccagaaagccagcggttcgcaacatttctaacgttgtcgcctgctgaaccgcccgaccctcgtcctccaccactgaagttggacatgagggagatggggttgttctgattgatcgaagcctgccgcagcgctctagtttgacggactgaagattttgtgcaaggcgcaacttcagccagagtatccttagcgaccgagtccggatccagcgatactcaccacagctagcaatctcagacaagttcgtctccagtaccaatcctccttggatgatctcagccaaaacgagatgtacttcgtcgaaatgaaagatcaagtccagctcgcagacgttttcaaatgtccgatcaagtgactcgacgaacacctgaatcagatccaggattcccaattctgattccgcaccgtctaccacgaagctgagtcaagcaaggatcataagtcattagcaagcttctcatcgacagatgtctgtaaggctttgggcggcttacacaaagtataatgtcgcgtaatgccgatagatgatcctcgactcgtcctcttcctcttcgtcttcctccccttgataatcgtacgcgttccctgctcggcctttgcccttcctcctcggcttgaccttgccgtcagctccaactcgaggaaagtggagaccgggagcgtccaagaagttacataaccctgccgggcggtccgagacgaacgagaagatttgggcgaggagggcggattgcgattgagcaggcagaggagtgtagaatttggaaagccgggctttgccttcagaggtgtgatagtggggatgtagtcagtcggtttatctcctttcgtcaagaagaagcaaatgtcaactgaccatgattgttgaagatgagaacggcctggatcatgatggcggtacggcctgtaatccccttcccgtgacctagaggatttcgtcaaagcagctgtcgtaggcgtccagatgacaggtgtggtcgtttgcgtctcctttagattcggctacagtattaaggactaggtcggagctggagagatgacaactacgatagtctagaatcccaagagattcaggtcatgcaggttgccgatgtcaactatctcggcctcgagctctagccatgacgccttgacattcaatgatcaacaatcacgtaaataacgtaatagatgatcaacagattttatcattgacacgtcagatctcgcgatccaagaagctttttcgaacggcccgatttctcagcgacatctcccggccaccgatcaccaggccgtcgccctagaacgtttctgaatctctgcatacacggaagtggcagtagcgcgatttaacggaaggttttgcgggaccggatgatcgaggtcgttcgagggtcgaggacactttcggagtgaaaaggtcgagtgtggatcacgcaagccccctactaaagcaagggctcgagatggcagccatgaacccctggcttggtgctgcatggcataccaacgtgtgagagagacaaacaaagccctgttcatgagctgtacggagttatagacgttgcatactgttgtaccctcctcctactggctacggagccgtttgcaactgaacagaagtttcgccggagctactatattcagagttgattccctcgatttgatcccttccccatcgtggttagcgcgatcactttatctttgaccggtctccgtttcatccgtatatcctccgctcctctccggtgaagttgcgttggcgacggccgtgattgataaattcatcaatgagtatacgtcagccaacctctacgacgaaatacagaagtgatcgcaatctcggtagctatggccaactctcgaccaaaggcgacggggcggtacgtttcgcaatgagatcgcgatcgacgagagtgagatcctgatggagccataggagcatatgacatgtggcttatggatctcgactcgcgactcgcgatcgcgagagcggggcggtgccgggacgagggcttttcatccaaccgaccacttgccatgagtcggatttcccccgatagataacacctcacgtggcaagggttctctgccaacagatatcttgcccattgcagatgcggcagccagtcgttttttggagccgggcgatgcgcgatgatgaggtggtgtcggatgcagcgtggtcggtggcgcattaacaaggcaaggtgtagattatcgcttcgtcatccgcgggggaggtgaagagggggaagcaacgtcacgcgcacctcaccggctaagcgacgcacgcacacgggtctcccccctgctctctcttctgctccccgatcggccgtcacggcggagcgctccactcgtcctcgttggccgtcccttgaccacctacctcgacagcccgaaattcacgacgctccgccacaggccttcgctgctttcggtaatctgcctcttttactcttctagcttctagcctggcactacggtaggtggatttcagcggtagtgcaatacccaaaagttggtctctcttcgtttcccttcaaaaggtcccaaccctgtttccacccagcggactggatccacgctaaactagtcgatttcgccttcaacctcgccctcgaaatcagcagagcagagagatatccaacagacaagctaaccaccctggtctctctacctcgcgccaatcgtcttgaagctcgtaatcgattaggcttgaaccttccatcacgtcggacatctttaatcgatccacctacgatcatacgcacctgctcatcgagcgaagccatcgtcaacgttagcttcgacgagatccgatccggacagcctcacatgaacagcgggctggttcactgtggttgtcggaaacatctgcacagtcacacctcaacagatacctcgaccgccgctagtatcataggtacaatcagctcggagcgtttcgatcaactagtctcgagctagacccaacctcggtcaacatcgtcgtcacagcttacccaagacgatacttgtccacctacacgaaacgatcgactgttcacgactctcgacgtgagtttgctgtgcgtcgaccttgctcaagcaacgcctgtcaaagcttacaccgactcgaacgacatccagcacgactagacgacgttgagtacccactcgaccatctggtgcaacaccgaagaagtcgatcccacccgtgaacaagatcacctgttgccgcctggaacggctcagttcatctcgcacacactcctaacgaacctatccctcacgcttatatgagtctcgacatgacctctgccgcccttccccctatcagtcaggactttgcgaggccgagcctccatgacacccgacgacccgccacgagcgctgggatcatacaactctccggtgctgccctgcccggaaccaacagcctcgggggtcagaatggcatgcaggccggccagatgcagaataccgccttcaacgcgttgaacgcctcggggatgatgggcatgaggttgaacgggtcctcgaaggggatgaccggtccgaacatgtcactggacgcagcgaggcgatcgagtcttagcctggcagccatcgacgagaacaaccccacgggctcgagccacgggcacaaagcacccatgacgacacagaacgctggttaccgcgtaccgaccggcggtggtcctccaggcagcgcgggtggcatgagcaatcctagcagcatgctccgaagagaaagcgatgccaactatgcgggagtctttgctcacaccgtcgaggatgccaatatttctcccgacaacggaaggcgagagccgaacgcgccgtctttcaataaccctttccccacctctgtcctcgatcccgcgctgctttcgggtggttcacagagccgacccggatcgcaacagcagcagggggtcaggttccagtctcccgccgatcctcctcagaacaatatggactactactcttccgcaaatgcctggcggcgattatctgaacctcatcacagacatgtgcagaatggctatgccagccttcccaatgcttctgcactttatggcggagccggcatgagtggttatccctcttctaataacagtctctccatgcgagacttgcacatcgccacttcccagggtcgcgccgatgatactcccgctacagcacccgtattcggcagtatgcagcagccttctccgacgtctgcagcttcgtttgcttccgccccggatcctcgttcgagctatcctggaggtggatacaatggctacccgcctgcttcccatatgcaacaatggcagtacgggtcgttcgcgggcagcgctcaggctcagcagcagatgcagcaacaacaagcagcacagcgacgacgatcgacgcagggtgccacgaccggttattacagctcttctggcaacaatgccaacgaagtgtcaaggaggccttcagtcgttgacggttcaaatcaaggatacgggcacgaagccagacactcgataggtgtcccacctagcggtcaatgggccggtttccctatcgattaccgatttggcgacgttccaccgcagcatcgttcgagcgtttccggggcgtcatcgcagatggctgccgggatgcaaccggggcatatgccagctggtttccccatgggcgcgtaccccgatcccaataccggtttcgttcaaccttacgatgatgtgcggaacaactcgtactcgacgggctcgacccaatcgctgtctcggcagagtttcgaggcgaggatgtccgacggtcacgtcagcgacgcgctcagacggaacagcgcaactagtaccgctgatggacgatactcaggtgacggttcgcaagatccggctagtgggccatccgtaaagaagcgaccgaggaggagatttgaccagatcgagcgtctttatacatgtcgatgggatggctgcgacaaggcttatggaacactgaaccacttgaacgcccacgtcagcatgcagaaacacggaatcaagaggaagccagaaggtcagttcagacagctcgagttgcactcatagtcgagcggtatactcactatcatcccgcgctttaccagagttcaaagatgtcaggaaggcatggaggaagaggaagaaggaagaggctcgcatggcggcggaagcagctcagaggaccggagtcatggatccggctgcggcggaagcgatggcatgggaggccgaggggaagtggttggctcactgaaagaaagaagccatcatcagagcgaaacgtcattactttcattttacgattcgcggtcggtaaataccgcgagcccctactcgtcatatcccatccatatgactcgagtctgaccgagatctagttgtactagccacatttgcgaattcttctcactctatgtcattctttgccatctgttctcgaagcaccttgtcagatctctcaagatccacctcgtggtctacacaaatccaggtccatctctgtacggaagcatatccggaggcaaatttccggctgatcatcggtcgagaagctcgcaaggtcaattcaccttccacctgatcaattgcaccaggtagcctacctcggctttttcacgcaggactgtcagccttcactgatcactgatacttgatagcactggattgtatacgactgtatcacgacaggcaaaagcccaggaacaccatacgcgatgctgactccagacatcatgatggcacccggaccttcccgtccagcttcccattcaaatccgtatcatcgatcaggtcgtattccaggaagagaaggagtgcaatattcggcagacgtggcggcaacttccaggcctccttgggagcttcaaaatgcgctagaactaccgccaatcgttcggtccagcagtacaccaaggcgtacggctccagctcggtttcgtaccgctcagacacgaactttacctcctcatcacttcgatcctcgatcatccagcataccaggcgcaaggtatcctcaactgcagccgaatggctcaacttttcctcgtggtccccacgtccgagactattcaaaggttcagcaggtacagccagcttatagcttgcgtgatcggggatcttggaatgccaacggacgtgaacctgccaggccggcaagcaactatttggctatcgaagcttttggattcgatgtctcgacgagtaaccggattcgaaaagggatcttgctccgggagacgtctagggaacacaaagcgttggaaacacatcctacatcatcgagttcggccatcgagtatatgggtaccacgctcgataggcctagagggggtttcctgccagctgctcgaagtcgaggtaggggtccgggtcaccccaatcttcgaggagcaaggggtggaggtagaacatatcgcttcgaacagacttcttcagcatccgagtcgagcgatcaagctgcaagaggtggttttggacgacggggcaggcccggcagaggcacactcaagggtgctggcctgagtcgatcggagctcattgcttctatgcttagagaaggagatgaagaactcgacatgagcgtcaccatgtctacacgcaccgaactttcggtgaccaacggaggtctagagatgtttgacatgggtgagagcgatgctacattccccacaagaaccgccagtcccgtgacatcgacagccagcaacgtggatatttcggagaacagggacatgagcaatgctctacaagagctcgaagttttggattctatggccactgaggaattacctgaagagatgaaggttccggaaatggctgccccttctctccaaccagcgtcggattgcaccatttcccgtactgaaacgatgactgaatcagactctgattccggcgaggatgaaacgagcggagctgatgcaagcgacgaggacggttcttcagaaggcggaaaaccaactccttcccgtcgaaaagcagaattagacaacttcgagcttcggcgaaagaatccgtatcggttctcccctgacagtttcgccgtaggtgtcctcgatcacacggggaaattctcgcccggattccatacgcctacgatcgagtcgtctatcgcatttgacgcacgtaagaaggcctttctcatcgatgtcattccgactacgccagagcctctgccagctgctatggagctggtcgatgcatgtatcagggttgaggatatcatcgaaggaggtgtcgccatcgtcgcgactgcgcacgaggacttggtcgatgtgactatgacaatcacctgccgtaggccgcctcaattcttcatgccggtattggacgagtacaaccagccagcttacaaggacagtcgggcggtggaagcaacacgagccgaattttaacgcgtggctgaaaaggtccggggggcagcaagcacgccgttcatcaaggaggattctgcacgaggcggctttgcatctttacgttcgcctggcacagctttcggtgataccggaatatttagggagaccaggcccgggacgcctgagagcagttacagcgagcgcaaagggggaagccttcggcaagaaagccagacgcgacggcgcgaagttcacctccccatcgaatcgattgggttcggtcggccccaccctagcaaacccgaatccggcgctctgttacgatggcgcagagcgaccgaatttgatttttccggctccttcaatggatgggagagagaagctggcagtatcaatcccgatggagacgttcgctataaggtatgtgattctgtcatctgggcggaagagcgccattttgcgagcgttcatcgccttgattgcaggtcaacttttggggcacatatcgcttgaccttctatctgatgccaactgaataccgcctgctccaagcgtgtatgcgcaggttgagtcttattggcgaagaagatggcggaaactacatctcctctactatggatctgccggccgtgcctcgtccgccacccacccctgacgtcccaattccggagcatgagactataatccgaccggtaatcatctccgagatcgaatcggtcaagagactgcctttcgccacccggtttctagtggagggtctggtttcgcaaggtctggtacagtcccaccaggtagagcgcatggtcgaaatcgtcaatcgtctcgatggaagaggcgaatacaagattatgaatcaggttctgagcgacctcttctcggcagagaggatgggaaacatggagatcaccctggagcgacgggctactctatatcagacgctcgagaagctagttcgacccaaaaagtcaagacaagacatcgcagcggaaaagtctactgcggaagagccgaatcattccgtcaagattcgacgagcgattgtgacccctactcgaatgatgctccaaccggagacgagggaacaaggcaactccgtgttgaggcgcttcaaggaatatcacgatcgttttctgcgagtccaatttcatgacgagcatgatcaattacaagtcaatgtctccgttaaagaagccaatgccatcaatccaaaggcaggaaccatggctcgcattcacagggcgttagaacacggtcggtcattggagggagaaaatatcggtttctagcagcttcggcttcgcagctgaaagagcacagctgttggttcttcgcagaagtgagcaaagctgacaatggtgggaaacgatttggagtcgaggatatcattcagtggatggggaatctgcaagaggaaagggtcattgccaagcatgccggtgggtttttcgctttcacagccatgcaacctgacgtactaaaggagcatgatatgctgcgtttcgacagctaggcaaggtcttgtaagcacgagaggcgctcgcgtattgccagtaagctgaatgttgttgtttgcttaggtcctatcgacgactcagggtgttgatatggccatcaagctcaggcgaccgatggaagatgtagtagctcgagcggatccatccgacccgaactccaaggtgactttcacctttacggatggtgttggacgatgcgcgcaaaacgttgcggaccaagcagctaaggatctcggtttcgatgatcatgatgtgcaccgtcatccctcagcgattcagttccgtctcggaggggccaagggagttttatgtgcatggccgtcagtaaaaccccgcgagatcttcttgcgtccatcgcaaatcaaattcgaatcggacagcaagaagctgcacgtagtccgaattgcccagttcaggaaggcctttctgaataggcaattctgcatcttgttcgccgctcttggcgtggattcggaggtcctcaaaggtctcatctggaacaaggcgaaatcgatcattggtctggctgaacgggtcgcagcggggcgactgaccaggaaagacctatggatgatcgacaaggtggccaccttccccattgcggctttgatcaacgctggctttcacaaggatccggtcgtcttagacgtgtgtacagtcacagagcggcgcatgctcacggacttgcggtggcatgctagagtcgaagtggatcagggcgtatacctcatgggggtagcagacgaaagcggactcctgaaagagggtgaggttttctgtcaatacgaagaccccgagagcgaagaaggacctgttatggtcaaaggggactgcgccatcactcgcgctccggcacttcatccaggcgacatccggaaggtgacagcggtggacatcccggaactccactcactcaaaaacgtcatcgttttcaatgtgaaagggccgcgagacctaccaaacatgctgggtggaggcgatctcgatggtatgatagtccatataggtcagtaccatctgatagcatactgagcatccttgttggtacacaggggacgactacacgttgatctgggacaagaggtttgtagaacctctcagagtcgcctagcccgccgattacaccgctgtgaaaccccaaagcgttgcctgggtagagcataaggatatcaaggaggcaagttgacatgcccgctcgcgtcaccttcgatcttgactgaacttacagtccaccacctcagaacttcgtgaactacatcctgaacgatcttttgggactgattggaaacgcccatctggcatactgtgacctcgagcccgaaggacctttcagcaaaaagtgtttgcaactgtgtcaactttacagtacagccgttgacttcgccaagagtgagcggttctagactaagttgaggagaaccgtcagttcaacgacaccacctctttcatttagctggagttcccgcagagcttcctccagactataggcctaacctctggccggacttcatgggaaaagagccgttccgctcatatcccggaaacagtgttctgggcgagatcttccgcatggtcagccttgtggtccagttatgactatatctgacgatactgacactgctcggttcacaggttgaaacgaaagaaccgaaaggcttatttgtggcaaagactgcggatgatatccggtctagtatggtggacgctcggctcgaacaggtcgagatcccgaacgcggtcatgtcgctcgctgccaagctgaagatgaagtatgatcttgccatatctgcgctaatggcccggtgagtcgtccacaactctagccttacaacctcaaagctgagtatcagttttcaaccgtagatacaagttgacggagatggagctgatcagcgggcttgtcttgaagaatggaagacgccgacgtatcagagacggcgacctcaaggtgagtcgtggagctgtatctttcctttgaagtcaagacgatctgaagccccatcgataggacccgatgagacgagcttatcgcgagatcgtcaccgatgtccttgatattgcgattcatgcaatgatcgacttgaaaatctcgtccaaccttggaccccgtccgttgtttgcggtcgctgcgtataagatcacttaccaaccgaagaggtatcagaacattatcccaaatcttagcttgaccgatgacgacgaaccgcaaacgtgagtgaggttcaagagaaggattcttgaacacgtgtagaactaatccgttcacaactatgtagcaaaccgctatccttcgcttggttggcctggaaggacattttgtcgcttcctgtctttgagaatgcctacccaggaagctgatcaggcggatccgacttgctgtaagctgctacgatcatattatgacccgcacgatcgcaccggaataccatccactggaaatgtatcgcttatagtttgcaatgggaattatggaccgttcgatatcatgttctacatgctctctcatccagtatccctttgcctctcactttccacctttcgcagcctcgaagaatagtgtccagcgagatgacaagctcaagtccatgccattcgcctaattccttcaaaccatgttcaaccctattcccgttggctctcggcaaggtggcatctgtcgctcgccgattcgacgcgagcatgcctagcttgtccagaacgaaaacgacatcatcctgccggactttggcgacatgtgatagccgcttgagcgtgactttatggctgaattgtagatgggcatgttgcgcgagatgtgccggaggcgcgaagtctaaagtcgtccgcaacacccagtcggcattccaatagatacggcttgatcgacagtgcgggacactcacctgcgtaagtcaaaaatgccccagacgccaatttggtcttcaaggtctctttcgccgcctctacccaattctgcaaacctgatctctcctcggtcggaacagcgtcgagagcaagaaacagaaggctgcgtagcacgttcttgatccagaaggactcgtaaccgatggcgcctagttcagaaagcggtctctcgggtgtgccgggcgagtcggcgtctcgtgtcaaataatagcctgcaagatggcgctgcagatttacatgcatgtgcgtgacgaggtagatcgaccacccgcttactgaattccatcaagagtttgccgtaaccacgaccttgatactggggaaacgcgacgatgcaagccaaattgaagtcttctgatgatattatttcctaagaaggatggcgccaaccaatgttcagtgagtaggtcgtgcaagcaggggtcggctggtcttaccttcgaaaagaacccgatagcatgctcgcgtttgtacatattttccgtcagaatgtagaagaggaaattatccacctaatggcgaagcgaagtcatgctttggtttgagtcatttcttcgtcgctattcgacatcgattcacttacatcgaagaagatggtctgaggcggtgtgaataagaagatcgagattattgagctatggcaaaaggggctaaagcacagaatggagtgcctcactttgtgatcgataaacagcttcccaaacaagctcagattctggcaatacagctacgaagagcatatcgagcagaaatatcgtcggattgagcatcaagtaaacactatcaagaccatgtccactgaagtactgaccttttgcgcgttcccctcgacctcccagatactatagctccccttttcatacactttccgtcctggcgggtgatctaccttacaggtggcctatcatcatgagggaaagctgataagtaaccaacattgtcacaagagttcacgatgacatgacccggacttgccgtatgactcgtatatcccgccaacgtgctgagatacttgaagcatccatcgcacacccacaacatcttctccttgactttatccccggaagaatctttcccattcaaatccgattttgcatccagtggcatagttcctcctaaaggtggtgacctcgaggtgagagacaagaggtctttcgtcgtccgtgatgagctcgactcgggatgaagggtcgcaaacctcccccgtgcacctcgggcgccatgatgattcgtgtcatccaggacagagatgccggtcgtcgtcgttaagtctgagaagggccgatccggagcatatggtaacgtgttgaccaatggttttgtcgcgctcgaagacgatggattgggaggaatggttggtgtgcctttgcgagcgggagggaggatttgcgaggtcgacgaagacggaatggcgggtttctcgctgacgagcggatatggagagtagaacctgcagaagcaatcttgagatacagacctaatacacgaggtgaagcgttgtatgtactgaccaggtgtttagtacccattctccaaacctcaccgaaccaaagtttctcggcttgcttggcggatcatcatcgtcatctcggtcggcgtagaggtcccgatcacggttcctcctcgtcttgtggtcatattgaacttcggtagacaatgagacgatctccttactctctcggctccgtttcgaagacgaggcgatggacgagggagctccgtcgggcaggatctgaggacgagttcaggaggctcgaggataaagaccgagacatcatcataattttgacgttggtagcttacattggtttccgctcgtggccgttttcgaggagtctccagcatagttaatgctaagtcttgaactgttatcgaatccttcctatgggagtcgtcaaagccatttcgagctgcaaagctgcaataatatgaaatgctcactatatcgaccgcgatctagtcgacctgcaacctggtagatgttggatgttgacgatgtcagccgatatgagtcaaaccgatcaaactcaaaattacgagagagcatcatctcggcatccagatcttcctgcgcgtcgcctccttccccctctccactttagcgcttcttcccggaagcaaattccatcttctgacgactccggtgctgagagatcagagaaggtcaactccgacgaggtatagaggaggattagcaagactatcaatggaccatctggagcacaccaaagcttacctgtcagctatctgggaacttttcgcatacctggaattgtcaaacgaatagattatctattgactgaaccatgggctctgcacctggagaaggagattatgagacgatcgaaggggagcagaagaagcgagtcgtaagtactagcaaagccccgagaagccttcgtcccagcaaagatatctcttccgaagacatgggattgggcgctcagacgcacggaaatgggctatgcgtcatttcaacattaagcttgcagtcctgatcgccgctgtctgttgtgctgtcgcagtgttatttcttcgactcggatatcggcaactaccactatggcccaggcaagtctcgaaaccttttcggcacccacatcgccgtggtgctacatacgcaaatctagcacgagttgtacttatctgctttcgcctgctcagttcatcccatgaagccgactcggataaggatgacgcattcgctggtcatgaactacggtctttacaagaagatggaaatctttgtacgtctcctgtagtcatctcggatcttcccatcgcctcccacagcctcgctgacgcactttctaatatcctgtatcctcggcattcttttgtcgatagcgcgcgaaacccgcgaccaagagagagatgtctcaattccacacggacgaatacgtcgactttttataccggatcaacccggagaatgccaatggatacgcacgggaacagcagaagtgtcagtaattcggccccctgtcctgtctgtcatcgcctacgtggttgccaatgttctccggtggctcctccttgcatacagacaatgtcggagacgactgtccgatctttgacgggctgttcgaatactgctcgatttcggcgggaggttccatgggtaagtaacatggctctcgacaataatcaggtttcccgaccgggctgatcgagagccgctgttatgggcaaacttagagggagcggccaggctgtcgcgggacaagtgtgacattgccgtcaactgggctggtggcttgcatcacgccaaaaaggccgaagctagcggtttctgttacgtcaacggtcagtactcttcccgtcgaactgcaaattcttgaatgctgaaaacagacgttttcatctagatatcgtacttggtatccttgagctgctgaggtatcaccagagggtcatgtatatcgatatcgatgtccatcacggggacggggttgaagaggcattctatactaccgatcgggtgatgaccctgagtttccataaatacggtacgttccgcacgcttccctcggattcagctggaaagccttaactgacattacgagacgctcgtaggtgaattctttccgggtaccggggagcttagagatatcggaatcgggaagggcaaatagtgggtctagaagggaagatgcgcttcgacaagacagttagtctaaccgaattgtctaatcatagctacgccctcaatgtgcccttgagggacgggatcaccgacgatggctacagggagatctttgaatcagtgagatcagttcccacttggagaagcaaacgcatgcagactgataacatatttttttcagacggtcgggcggtcggtcgagtggtacaagcccaccgctatcgtgttgcagtgcggagccgattcgttggccggagacaagcttggctacttcaatctgtcactaaagggtgcgttgagataagtttgtttgacatagtgagcgtcgtgactgaacaaccagagccgactctttgcccggactaggtcacgccgattgcgtacaattcgtcaaaaagttcaacttgcccctgttgctgcttggtggaggtggatacacgcttcgagcgacatctcgggcgtgggcatacgagacgggtctcgctgcaggcgtaaagctttgtcggcggattcctgccaacgaatactttgagcactatggtccggattatgagctggatgtgaggagctctaatatggaggacttgaacacacccgagtacctggcgaagattcagcgggcgatctatgagaatttgagggaaaaggaggccgctcccgggattcagatgcagagtgagtctcgccgcaatagaaagcgtggatgtggctttgctgaccggttccgtacaactgaataggcgtaccgaagctggatcacgacgacgatgacggccgcgaggacgaagatatggaggatcctgatatccggatcaacagtaagtttgttggtattgcgcctcttgtgatcggtcattgaacttgatatacactcgtctctcgttccagtccgccaaaaggatgcccggatacagcgggatggcgagttgtctgactcggacgacgagggcatgggtggacgcaggcatcgtcagaaccatggggagtccagtgaaaagcctagcagccgacgtaaaggcaagtcgccggagaagcgagaaaagaacggatccattgcgaacggcgtatcgacatcgccgaaggcggagaagagcgcgagcgcaaatggcgagaagacagtctcgagtacacccgagctcaatccggaagcacctcccgctccgaagggcactattgtcagtacgggtgcgatcgtgcctactgaggaactcgaagaaggggagatcgaggacgacatcgagatgaaggccaccggtaccgatacgccgacaaatcagagcgccgatgtggacatggatgcggtcaatagcgagatcgagatcgaaaaggcgaccgggcagattgaccaggtcggtacagaggccaagggtgctgacgagaccggcgttgtgccgcccgcgccgactgctggaccttcggcatgattcgtgcttgatgcagttccccttcgaccatcatcaggcgagaagaagccttgatgggagagtcggtttccatagttgtatgtagtccattatcagtatcatggattgtctgaggtctgcaaggtggtgtctcgtacgacgacccaggttcacattttcaatacagttcatgtggccttgtcggtccacgcatgtagggatctaccgtgacgctctgaccacaagccatgtgctagctgttgagcgactcgcgaatgttcggttgatatgtcgctgctatagtcgtagccttagtgaacattgtcgccgcctttaatccttgtcggtcaaactattgtttcagtttggccaccagccttgtcgtcattcgcaaaccgaccaggacttgtgcagcttgtactatcctgctgttgtgtggcgccagatgtgccgaaccggacgtcccgaacaatgttgcgtgcccataatggccactgctatatctcgtcgggtgagcatcatcttatacaactcgtgtcgaagcgtaaaacaaaacgtcgtaaggcggtttcgggaacggtcatgcgctgtaattgcttaggcctctaatatatcggtccacggcggtccggaactgaggatcaagagtcggcagcaggaccatcgtgttggttgttcagtagagtgtacagacccgagagtgcgcaagctgaacactcactcgatcgttgtcgatccctttccctcggatctgaccctttttcgcttctacgccccaactttcgtccagcccaccgccgcgaacgccaacgagatcatttcgtaccacgaaatcgagaaaaggccccgagtagatcgatttgaggacaaactgcatgttgtccgctaggggatcgctgaggaggatgaacttgtagccagagagggtctcgaagaagtggaatttatacgctgatgttcgatatgactggaacaattcgtttctgagaggacaaagctgtcaaaaggtattcttttgatgaattcacgagtatgatgatagtgcttactttccagatagcttcttgaccatattccttagactcagcaacactccgtagaccagcttgcactcttcgtcaaatgccaatcccgcatgcttgccggcctcgccaattccgagtacatcagcccgctgcattactgcatgatgagccagtagaccctggataggctggccattctcgtccgtccgaggaaggttgttagggtctacaggatgctgtcgagccaggacagccgggtcgaatcgagcgacattgggctttaaaagagctgggactggtggtcggactggctttgagcgattccagtcgtggtagtagacacactcggtatgtctaaagccgtttggccgagcgtcagacacagatctcaccgggtgtttggcactcgcatatgagctcaccgatcaaagatgtataaagagaagattgtcattttctaacgatggtccatgtccaggcggcgcactccgaagccagttccaagggtcttctcgagatgtctcggaatgatacccaagttcggatttgtgtggctagacgggttgttgaaaaggttcaagagagaagaagacgtctggtatgatcaacgatggtgtagctaactagtagcagctaagctggttctcgagtttaggtacggggtgaatctggttccgaccggaatcagaatttatcatattatcgcttgcaactcgaaagttgaaagctagatcaaccaccacgaaagaggtctagacgtaagtactcaagcaaccggttgatcacagctagaatcaaccaatcgagcataggctcagttttctccgacatgtcagctgtagcagcaagaaaggccgcgctggccgctaaattggccaccgaaggtctcaatccttcagtggtttcatcacctatgtcaacccctccaccagctgcatcgccagcacccgccgccggggaggtcgttgacgagattccgcaagcttcttcttcgaaagctacaaccccgagtagaaagtcggcaaaaaagagctcgccgagacgttcaggtcgtgacgcgggaaagaaggatgttcaggtcgagaagacagcacatcagcgataccatgaggaacctacggcaggcgagaaacgcaagaacggagaaaagaggatcaccagggcatacgaagaggcagtagagcagggaaaatccccacctttcgctgcttcggtcgatcaggatgaaagatcacggtcacacagcgaggatgacgaggaaatcgacttttctgctttggaattgctgcaaacgattaccaacggcagacccaagaagaagcgacggatttcgaggtaattctagagaggcaaacgaagtctctgatgtcgatcaaaattgatgatatgactcccggcaatagcagcgatgagcctaagacatattccaacttcgtcttgcaacaaggctcaaatatttgtcgtgtcgcggtcgacaaactgtcaggcttcgagtcggtagctcgacacggcagtgcagtttgcataagcatgcggcaagacgaggtgagtcgcctgcgtgtaccaacgcaatggtcttgtctctgattgtatttgtccagttcatcacgttttccggcatggctctgctcaccccgttgcggaattcggtgtccctcttttcctctattatccatccagccaaagaggtggaagatgtctctccacatagactgtttgcccccctgacgagtccgttgcctgtagtccgtcctcaaagcggcgcgcagacacgaagctctccccttcttacggcactagatctccccaaggagatgcttgcagctggtcgaactctcttcctgattcaagagctaaactgcgggatcgagaggctaggacgagctgtcatgactctgggcaaggtctggccagatgcaggatcccgtggcgcattcggtctacgaggagcatttccggtaagttcggttgaatatatatgatagtgctgttgaggctgatctgtctcggtccgtcggcttcgtatccagctgatacattcgcctgagcatgccgtttatccgcacgtgactcctgaatcctggtcgtcggctttgcagtccctctcgggcgatgatgtcgagaggtccaacgaaggggacgcctatcgttacgctgcagacgacgatgaaacgttcgataggtcggccccgctcgtggcaatcgtcaaaggtcctaaacgtagcggaaagagtacctttgcgagagaagcgttgaaccggctattgaaccgttacgcgaccgttgcctacctggattgtgatctgggtcagagcgagtttgcaccgggcggcaccgtgggattgtatatcgtcagcaagccgcttttaggtgagtggacggaagtgtgagagactcgaagctctgatactaagcttgcgttcaacttttcaggaccatcatacacgcaccctttacagcccgtacgatctcactttgtcgggtcgctgaatccacgactcgaatcagcacactacatcgagagtatcgcttctctgctggaacactatcgctacgagtcgcaatacccgctcgaccagatgcacgaccccagctcagaaaagatcaccgaggtcgtcccccttgttgtcaacacgcaaggatgggtcaagggtctaggagcggacctactcgagcagatcgagtcgatgattcaggccacccatacctttgctttcggcgccaacggctttgagaatgtggacggggacgaaccgcggccgttcacaggagaggactacgaggttgtagcagagcgatcgctaggcatgggtggttttggtcgtgtcatccagctggaggccgcaccgacttcagggttgttctctcggttttccccggccgatacgaggacgctgtcgacgatcgcctacctgcacgcgcggttttcgacccaagacgaggttgtctgggatttccaggaggctctcgtgggtatgccaccttgggaggttgactttgaccaggtcatcaaggcagtctatctatcgggagaggggtctgacggcattgttgaagacgatctcggcttgtcactgaacggaagcatcgtcgcgctcctcgagcgtacgagcgaacctatggagaaggtagaacgatatgtcggcggtcgagcgctaccttcgcctgcggaaacccactgcgtcgggttgggcttgatccgagcggtatccccagaccacacggcgctccagctcctgacgccgatccccgccggtcgattcgagaggatcagcgtgatcgccaagggagatctcgaattgcctctttgcggcagcctcgattggaagacgggggccatgaccgaggaaggtctgcttggcgtcccgtgggacgaggtgcctttcttgagcgtcaagccggagcgtggagtgggaatgagcaagcgcaagtttaggcgcaacattatgagaaggaaccaagctgtatgattcgtgttctactcggtatgcgtgtgaattgatacaacggggatgcaatgcgatgttcagggctaggggcccggagtgaaatgtcttccagatgccagaaacgacgccagtcggtgcgccgagctcgactacattccttccgaggggtcttcgagctgagccaattcttcggcaattcggtagtaattctgatggaaagagagtatattgtcagcaaggtttcgtcgtctatcccgggtcaagtccgacttgctagatattcgtccgaagacattctctcttgatcttcttctgtcacgtcgccgtaacgcatgtcctggccgtccactgtgaccggaacgacgacgagaggtcagtgacgcggactcgtacttttggccggcgcgaaactcacccttgatgatggaattcttgtaagcctcgatatcctcggtcctgttgacattggtatccacggcctccatctcgtcttcggcatcgtcctgacctgcgctcggaacgaggctcggtgcgcgactagatccgggttcgtccttgacattggcggtggaagtggacgctgcggcattctctcgtccttctgccaagagcctagcatagtgcgcgtccagttctgcgaaaaagtgtccaaaccacgatcgcatcagcgccgagcgatcgtctcgcgcgtgatcccggctcgactcgcctgcatcggtcgtgtccaccttgacgtcctcttgtccgagcaacgaccgggcttctcgctcggcttttacctgttgcaacttgtcgtgcttgacacccaattcggtctgttgacccgtgacggtcgattgaatcgcccaggctggcaagacctgtttgttcctaaagaatggaaaaaaaccgcgttacacgagcgcgaatcagcacgcctgcatgtgtgaccattgccgctgagaactggacttgctgttcaatctcgatctttctcgcaatctcggcgtcgatcttggcttgtttctcctctggggtgagataaggttcgttcctgtccttgcgcttctcccaagggacatagaccctacgatccttggcgtccctttcgacgatgatcgtctcgggcacgtggtgcaacaaccaattgatcggttcgaacctgcgggcgaggtgtcgtcaatacgggggaggtgcgagagacgaacggggtagcccggaacgacccccactcgcctatcaaattcgatcttttccacgcgctgcaacgacttccttatcggcgccatggcgttgttgaacacctccatcttcttgtctgcctcggtgagttgtttctcgttcatcttgggttcgagctgttccccacacacgtcacacgcgacgatgaaatcgccctctcgttcgaccatgctcatcgccaggttttggatgagcgaggggatctgcagggcgtcgaattctttctgacattgagggcacttgtaatcgctcttggccgtgtcgtcctgcgagggaaacgtccagcgtggtcagtcgccgaccgccagacccagacctcttgacgtcagggatcgagaccactttttctcctccatctcaccgcccgccccgactcaccttgaccatgctcgcctcgatttgactccgcatgacggccaaccggtacttgacgacgagcacgaaatcgtggtaatcgatgtaccaatatacgcgtttcatcgtctgacgtttttgaagcgggagaccgtccggacctcgaccggccgagttttcgtaattcaagaaactggacgaacggggcgggcgattggagtagattcgattgagagaccaggaccgggaaggcgtcgacgactcactcacctcttgaccaacctctgcctctgtaacaatttcaacaacttgcccacgttggtctcgctcgcgctgaccccgcccgagatcccgacctggtgacctagaccgggttctaggtgcctgtgtggccgataccggggcgagcgggcgagcgaatggagtgaagtgaaacgacattgacatggacagcgagaggtgaaggaagggaggaaagggatcgtaatggttcgcatgagcttgggttttgtactattacaacggtgaagaatgagaagaagaggaaaacgatgcgttcgagtgcggcgacgaggaggaggagagaaagaggagatggagggaagaagaagaggagagaaggtggagagaaggcgaagaggagacggggaggagaagaagtagaagtaggagaataagagaaagaggagatgggaaaaagatgacagaacgacacgacacggccacctcacatatcgcttgtcatcatcctatccatgaggatgacaaagtgtggatcaaagaacgccctgctgacctgggtgacgagcgcgtgcattgcccttatctcggcctttgtacatccgctgctttcgtaaaccatcttgccaggtattcagcccggggtaggagtgtgatgtgtgacggtggtagtctagtcttgagtctatatgcgggttggtatgtcaaggtgggtggaagaggtgtggatgtggaatgggattttgttgtagatgtgccagtggatgaattgatcgaaaccggctgtccccgaactagcagctacctagctaactaggaatgtgtttccttaaaacttgacatttaccgtgagaaaccatgccagtcaccagccagcttactagtcggagtcgtcgatctggttggattgattcgatgattatttgttttgtgaaccgcggatgtccaacacctctcccccctcagctgggctggcttcggatggaatcgcgcaaacgggatcgaccaaccaggagccaggcaaacatcccacctaccacccagcatcgtccactcaccaccacctcacactcacacaccccaacatcattcatcgacatccatagtccagatacacttcgcacactgttccgagccactaccatcgcctcctcctccccacacctcgcgctcgtctttccaaggaaaccgaccgacaactcacatcacaaccacgggaaggagtaaagcacaggaaaaaaaaaaagaggacaaggtcatcgccgattcttcaaccccaccccccttgcaaaaccaaatcgaactagtctattaaatcgaatcatgttcaacttgagccgtgttggattgagggctgccggcaagaccgccgctagtgtgagtaaaggacggtccaggtcgcaggtcgagagcgaggtcgatcgaggtcgttcccggtacgaaacttcgacaacgcgggggatcgaccatctcgccatccaggaaacgatcgatgacgacgtcggacgaggttcacatcgaggccaacaagatcgggacgtcaacgaccatcccgatctcgcctcgtaccccaaaagtcatggaattcccgatcatcttcgaaaagtgcctcaagggatccctcgtcttccccgatcggatccgaccacggacttcgctctcgaacgattagtgaatagcaggccagatcgcggatcgctgacatgcccaaaacttgctccgcccctatacgcacttttctcgcccgtctctgcccggcatacctcaaactcgacgcccccgacccttgcttgatcttgttgaatgcgacaggcccgattcgctagcacccaagctggagccgccgagagggtcagtcatttcgccccttctttgcgttttgacgtggcgttcgacgctgatcccccccccacgcgcacatgctctctctctcacggacccgtcacaggcattcacctcccgcccagccgtcgcgaccgcgaccgccctctcgctcggttcgatagcctactatgcgcacactttcggtcaactcccctttttgccccaggcgagcgccaacactgccgccgacgacggtctccactcggccgagtacccctgggctcaccgaggcattttcgacacgtttgaccacgcgtccatccgacgtggataccaggtctaccgagaggtctgttcggcctgtcattcgctcgataggatcgcctggcgaaacctcgtcggtgtctcccacaccgtcgacgaggtcaaggggatggccgaagaggtcgagtaccaggacggaccgaacgacgagggtgaaatgttccagaggcccgggaagttggccgattacatgcctcctccttatgccaatgacgaggccgccagggccgggaatgcgggtgctctgccccccgatctctcgttgatgaccaaggcccgacacggtggtgccgtgagtgtcttccctcgtcactccggtcgtcctcgtcgcaagtgctgatttcgtcttcgtcccgtctcgccgccgcacaggactacgtctactcgttgctcaccggatacgtcgaccccccaccaggtgtcaccgtcgccgagggtatgaactacaacccctacttccccggcggtgggatcgccatgggccgagtgctctacgacggtctcgtcgagtacgaggacgggaccccttcgtccaccagtcagatggccaaggacgtcgtcagcttcttgtcctggaccgccgagcccgagttggacgacaggaagaagatgggtcttcaggtgaggcaattcgcgatggccgaacaggatcccccagatcgcagggcgtgaaaagctgacccgttggtttcgtcacgcgcaatgtgcataggcgaccatcatcttgtcgaccttgaccgccatcagtttgtacgtaaagagggccaagtggtcttcgttgaagaacaggaagctctgtaagtccccgtgcattccttccccaccttgtcgtcccgatgcgtcaccccggacaaacgagactgatcccgtgtgcaatgtatagactacaaccctcccaggtcgggtcactagactgccgtcgatgtgattcggggagaatgaacgagcgacgagtgacgggcgggcggagtatgcgtgtgtgtttgtgtgtgcggggggatgtagtaacgtggtccatgattgtgtgcatgcggattttagaatttccttctctctctttctcgggtcgcctggtagatcactctgttctctttgccacgatcctgtcgctgcattcgccggtctcggagcaacgaaacgagtgtcgttgttcctgacgcagcgacaagtattcgcctcaccggccgcttgttctgaggaaaaggattcacgatgtccatgggaacgtgttcgtccatttttgtcaagcttgctctcattgtgtcaagagcgtcatcggatgctgctgtggcgctattgagtgaggtgactgttcatgcaacagcgtggccgagagcttcattccaagtcttgtttggtgtttcaccaggtatccagcccgttttcatgcactgacaaatgttatgccaaagatctcggtgagaacgtcgactctggtgacgcccagttgacaacgaacgacaggtcatacccctataggttgggtcgattgtccaggttgaacaccaaatcgagacggcggaatgcttgatggtgcttcccgccacaacaggaagagccgataaaatggggttcatcacggcaagagcgctgagaggtacttcagagctgattctgaagccttttcaatattggggacggattcgagagtcagatcgtcatgaagctgccatcgatacttttctgttgaccaaaccagtcagctcttagccaggaagaagatctcgagggtcatcaagggtagcagttcacacaacggcgggtatagcaagatattctgggcaacggccgatccagtggtacatttgcccatgtcggaagctacatctgaacccacgtatgttctgttctatacctttctgatgtcgtctctcatatcatcccttcccatctgctaatatctcttttctttttaaaacgatcttacaaattacctcggcggctatcccgtaatcgagatctcttcgactctcgcgctccatctctacttttcacatgtacgcgctctctctatccacgcctgtcataaacatccctacagcacatatcgtatcaaagacctctgatcccagaacgccaccgcccaaccaggcccaacggttgtagccgctgccaccgccactgcccaacccactctcccggaggtgatcgttcttcgactccgatctattcaccatcaagggaccctacaccggagagtacgcccgtctcttgttcctagccgctacggccaatttccctctattgacgttctaccttgtgagcttgatcgtcacgaatgacagagctcaattagcggtggagctaattgaccgggccaggtgggggttgagaagcagggtctgggagggtcttatgcaagggcaaggggcgccgggcgtctccccgcatcctcacaagctgatgtcgttcatcgctcatacgcgtgtagcccaggcgaattcaatgatgaattttgtcattgtggcctagcaactgctggaagatatgcttggatcgctaccgtgatgtcttccgattttttatcgacttgtacttttgagggccgatttagagaaagagactggaatggtacggaggatgaatgaatggtgatctgacatgccttgttaccggagaggcgacccagatcgagaggatgcagaaggcgcgattgatccttgtacggcgactctcagggagacaacgaggttgccgcacgtgtttgataaaccgtgcgagactgagcgtccgggtccaaaagttatgcagaggatgcggtttgagaatcggagatgactcttttggagatctgaatccagggtcgacagaaatcgggatcctccacctcgctgggcggatatttgggttgataatgacgctgggcagtcgattctttgagccaacagctgagaggccacatcctgcatccagcccatcgctaccagctaagatggttctgcccagccaaacgtactcaacagggcctaataacagccgttatcgttgtaacaggcgagttgcaatgagggtcacgcctgctcctgatcctgccgcattgatcaggctcaggccggcttcagagaagacgccctctaggtcaattcttgtgcgagttccaagtgcccaaggcccaaagagcggatgatttagaggacgacccgttccagcgtaattgattcggttgtaacatcgataatgcaaccatcttgcgcctgaagctggcccgtgttgatagcctgtacgacccgtctcgtatacagagcttttagtgcttctggcaagtcgccaagctgagctttagtttcgagatttgccggacacgtaaaggacagcaattgaattctgaaatgctgaaagggtcaattggggtggttggcgcgtgtcgcacaggacactcacggatcgagagctggctgtctcagcgagaccttgacgagcgttaaaggtatgccatccaggtacgtgctgtgtcctgccgtcgaacgagacacggtgtagatgaccggatactcgagcaagattcccgcgagctcggagaattcctcgggcttgtcgaggaccaaggtgtgggtatcgagtcgagcttcgagttgctcttctagggagatgatatggcggttcaaagtgacgtcaagctggtgctactgaactctgatcaactgttgtctagactcgacgattggctggtcgcttactattgcgagagttggcaacgacacgtctatgttgtgcgttttgtctgcagaacatgggtctcctttcgtgctcaggtcatggtgcacgtccatgttgagcgcaaaggccgatccggtggtccgctcatatatcatagtcatgtgtttgagagtgctggtctgagcattttgaggaaagcattagtaagcgactcgtcgacatctgtagagccgaaatcacctctcggaatcgttctgcaatatcgctgcattcccgctcgtcgagctggaccgtctccaagagaaaagagcgtctgcgcggctggcttcagcgtcatgtttccgcctcgtatgggaaactttcggctcacctcaagccgatagcgacgatccagaacccctgaaccgtttctcgcatggcattccggctgatccttctaccgctgcgtgcgtttacagaacgttggccagtcaatgcttctcggatcaccgcctcgatccgtccatgaagggcgggtgtgtcgtaacgagctcgtgcatgatgagaatgcatgcagagggttgctttgcgtctgtctgcgtgcccagctgttgtttgaaagccgtcggaaagtacaaatcgataggggataaaggtataatgaactgattcctcgcttgacccctcggctggcaaaggtttcgcggacagggccgaaacgcctcgacgtccccgtcacgccaagccagggaggcgactggtcacacagaccacactgaccacactgaacacactgaacatctcgatcgatctatcgtaatatcatatcgcatgaagaaaccaaaagcccaggacatgaggtgaagaaaattaggaaaagtctagcaggacgagggacgagccgcacgattccgcgatgccgcggtcggcgggatggatgtcgtaacaaggatggggaaaacgaccgtcgaatgaaatgtatggctggctgttcgacggcgttcatgatgatgaggagggatgaggcgtattaggtaggaagcaggcgatctcggcgtcgacaagagatgacgacgcgagattgttgccgcgataaatgtccgaaaaaagggggggggaggggagaacgagaagatgccgagccgcgcagaggtccattgagggtctgacgcgtctaggaaggaggagctcgaggagtaaacttgagctgcagtccatccttggggaacaaggtgcacaggaccctgaagaaagagggaagaacgcggcaaaccaaacgtcagtctgcgagcgcgacgttgcgtgtctctggcctcccactcactgagtctcggaactttcgggggtgaccttgcgctcccaatccatcaggacggaagcgctaccaatgacggcggccaaatgcatcgaagcgtactgcactccaatacactgcggacggtacggagcatgacctctgatcagccgggttcctctttcacgtgaccgtttccagccaccacccatgcccgactcaccttgtggggaccgctaccccagaccatatagttctgagggtacttgtcggccaagacctgttcgccatcttccttggggatccatcgttcggggataaacttttccggctcggggtaagcggcagcgtcgtgcgtcgagtcccagaaggaggggatgatcatggtgcccgagggtacggtgtagtcgtcggcgagtttgaaagccttgcgggtcttgtaagggacctagtgtgcgcgggacacggtgagcctgggcgaacagaaaagacaaagcgttcaacagagggagacggcgcgactcaccatgatgacggggggaacgagtcgcaacgattctttgacgcaagcccgggtgtagaccatgtcatcgaccatgtccaacgaagtgggcgcttcgatatcgccacccctgatcctgtactgttcctccctgaccttttccaagatttcgggatgctccgacatgtgttggaacaagaagacgatggccgaggtcatggcgtcttgggaagcgaacaagaaggagaggacgaccatggcgatctcgtgatcagtgtactctcgactgagcacccgtcgttgttcctcttcgcccgacccctgacgcgcctggatcatctctccgatccaggcgtcgagcaagcaggtgggttcgttgccggctgccatgaatttcttggacgaggcggcggcggcgaccaaatgtttcatggcgactttacgtgcttgacaggcgttgtaaacgttggtcccggggagggcgagcggaaagttgacgagctggagggcgacggtgatcaaccagtacttgtcggaaatctcggccgcggcggcgtcgtccatgtgattcccggtaaacacccggagcgaggtctccatgttgagatccctcatggccatcatgtagggtttgggagccggactagggtccgacatccactgtttaaagtatttgcggtaaatgttctcctggatcgggaggtagatcgagagggccttcttggtgaacaagacgttgagcgctttacgataatcggcgtggaccttgccgtgcaaaaagaccctgagcgcgcgcgaacacaaagtcggtcggtcatcgtcgtcgtcgtcgtcgtcagcaaccaggatcgtgcgacgtgattgagaccgtgcgaaacgcgatcgactcaccagttttccttcaagaggatgggtttggctgacgaggtcaaacaaggctcggcataggtgggcgagttgaggatctttctcgagtactcgttggacgaggcgatgacgataaaactgcaaaaccagcgagcgcgcgcgcgggggcggctcaggatcagatcctctctcgacgtcgacgacggccggtaccagatcgagcgcacgaccgactcacatgttgaagacgctggtcacgctcaactcgccgctcgcccactgacgcttgtacccctcgagtcgagggtccatagaatccttgaacttgccgatgatggggatcgtccacttggcaccgggcaagtgagcctttttgtacctgtacacggcctgcgacgggggcggagaggcggggacatggatggacgtcagctttggcaggtctcgaggcgacgacggcggttcctcctcctcacctgttcgaggaccaacaaggtggcgaccatggccaacaagctccccaagacctgtttgttcaaccatccttgttcctgtcctgcctggacgagggtcgacctgcccgtggcggaccaagcggacgaggagaagaatgaagatccaaagaggtgtcgtttgaggtcatcggccgtcgtcgcaaagaggccaaacttggcgagcgagtcggcgacgagcgaggggaggggtagggaggagagggcgttcggggtggccgtggccagggtggccgcctgcgagacgttctgcatcggagcgccgggtcgggtcgggtcgggtcgagacggttcgataaagattgcgatgagggtctaggtggtgatcgttgcgagtcgaggatgtgctgcgatctttgcgtgtataattgatctcttgcgctgttccgaatgtggtttcccccaaattatccaatctagtcgctcgtcgtagctatctatgccaatgttgttcggggttgacgagtggcgccgagtgtggatggatggtggtgtgatcaaacgaatgtgaatgggtggaacgtcgtggtcgtggtcgtccgagtggtccccgatggtatggtatgtttcccttgggtcgtagacgagatcgatctgggggggaggaggggtgtctttgagaattagacttggggggtcgtcaacaatcgaaccacctttttcctcgtaaaagtcgtctctccctgctctgccccctgccgccttgtctgcctctggcacgcgcgcgttcttcccttccgccggccgaccccgggtgaggtgaggtgaggtgagaggccgcgaaaaacaaaacaatcccatacccacgcgcgccatcaaactacgccaccgccccatcccacccctcgcgtcagatgtgtataagagaggtgtgtgtgtgtgtgtgtgtgtgtgtgtgtgtgtgtgtgtgtgtgtgtgtgtgtatgctctttgtctaaacgtttctgtggacggtcaaccttttcttttgtttcgaaacccgaacaagagaaacgaaacaccccattcagccacgtttcaggcgcgtgaatgctattcaattgatgaagctaaatttaatactcggataaggaagcacgccgtctggtgacgaaagtaccaaaacttggagaaatctgttgattttgtcatctcgcgtgtgtaatcaaatcccaaaatgcaaagatcgctctcaaaatctggttcaagttcaaaatgcaatatccaaacgactttgaaggtcgagcatacaacatacacaagctctagccgcattcacctgtagacccgcatagtgcagatatcttgggattgcgccctagaagacgaaagctcaagcgaaaaaccgtactctcaggatggcccaggaagtagactttaacgaaccggtgatcacgacctcggacggtcttgacaagatcaccatcgtgagaccgcccctgtagcctcattcttataaacgaccggctcacacgtctcctcggctgggtcctttacgtgtgatcgatacagatccataacacgcccaactatgacatggtcactttctgcctgcacgaggaggaccacacactaggaaacgtcctccgatggatgtgcatgaaagagtcagtccaaccccccgtactgaattcttcttcctcgtgtgacatccgaatacctccagctgatgctccgatatggtcgttttcgatagtgacgatgtcgagttttgcgggtacagcgcacctcatccttcagagcccaagatccacctccgaatccagatgcacggtgagtccgccctcccccagcaccacctatcttcccgccacctcgatacggggcaagcatactgatgcctcgagattcggtacgatagaagggaaatccgcggtgacgtgcttgatgacggcattggccaacctgaaagatctgtacaagacaatcgatacgaaatacgctaccgacctagagtgagttctggggttgaacatcccccccttcccacccgctcgacctcggcgttgtaccgtcatgacatcgacgtccaaactttgctgatcgatgtacctcgaccggacccggtctggcttgctcggtagacatggagattacacgaccgaggaggactatgacgtctcgaccacggtggatgggatcgtctctgaagcgcgagaacggttcgaagaacgagaacgtgctcgacagtcgcagatcgaacagcaaggtcaggggaaagatgtcgagatggcctgagtcggttttaccggcatgagggaatgtagggaattaccacggggaagcttcccgcgtcgagtcgaagacgatggagtgagggtgtatttgtagaaggaggtctttggggcttgtagatcgatgacatcaatcgagtgtaccacgaccggacgggctcgttcgcagatagcagatagcaagttgccgggtgatgtctggctgggtgaccgatgaacagatcggtccacgctcaagtcgggacgtgccgagtgaattcgccgtcgagcatcgctactacaacgggagttgatctcatggcatggcatggatagcatcaccacaatagtatctcagcaatagatgtgactagcaatacatgtgggtgtgcacgtaattgatacagacaagtgatacgaagcagtccatccaaagatgatcaagggagagctttgccggaattgatcgcatccgccacctggataaaaagcgaccctgtgatgtgagctgggactgtgtatgtcgctcaatctggacgctagtgcggctcacctgactcaagttggggatgtttttggcgtatcgatgataactaccagaaaagcagattctccctatcagtcacggctccttcccggatgctgactgtgacccagagctacctgtccgtgtagagttcgtcggtgctcgtcgtggccgcgacagctggatgagacttgatggcctcgagccatttcgcgaaccgcctcgacgagtccgagatgacgggaggcgagaattgtcggtaatgccccagcacagggccgaaccggatggcccctggagatgcagaacatgttcgttagcggatgacaagcgattgggagcgccggaacttacatggtgcgatcagaatgtcgacccacccgagctcggcgccgaaaaagaaaggtccggtcgagttcatctcctgctcaaatgcttcgagcgcgtctgtaaagtctctgaatttttggggtcattagtttatgacccgctttgttcctcatccgacttgctttccatgttccacctgcttctccgcctcttgtgcttgaagataacggtagaacgctggtgtaatcgtctcggcatgcctttgaccagcgagaagcacccgtgctcttgcgtaagggtcgcttggtaacaaggggttctcgcccgtagacaagggcaatgcagccaggtagtgcatgatgactagactgtcatgcagagatttgccgtgtccgagacgagcagcctaggagtgggatactgagtaccaagcggcctggtgaagtccgggaatttaggcttaccggcacaagacctttcgggctgacctcgagcaactccttcggtttcttgtaaggatcgatctccacatatgtgtagtccaccttggacctctttctcgaatcatcatcttcgagaccttgattcaagacctccagagcgatccatgctctctgtacgaaaggacagaagcatgctcccatgaattcgatcgaaggatcgactactcgatcggccgaatgcgctgcagcggtatttgcagcttgtcccgtcgtttcgaggtgatagccggtagcagagcgtgacgacatttcgaaagttggattgttatggattgttgtgttttctgacaatgtacagatgccgaaactccaggttggatcttgaagtcgtcaaggctaagggtacttcaattatataacgatgattcgatgagccgacgtgatgacgaatctcgggatcgaccgaaatggtcgatcacgtcagccagacgctcctcaagagtcaccgcatatacaacaaccatatcgtggtaagatgataataccgaggtgccgtgcgttggtcaagtgtctgaagacgggaaatacgtaatgacccactcaagcgggatcgtacctgccattcgcgagtgactgacgtgccagagttctgtataccatttctgacactcggattcaaaatcgaggcatcagattcatgggtcatgtcgatacaaaaggtcatttcattatgaggtcaaagtcgtggactgatctaggttgcgacctcggctgcagcgtcgccgtcaagagtctgtgcacaaattacgatatcagataatgtatacggacgtcgaggcacccaacgcccacttacatccaaaatctcgacaaggaatcgatcgacctgacttggttgcatgcctccgcaggcggaagcgatcagttttcggtagctcgccatcttctcacccgtcccaacctgcaatcgattcggattcaataccgagccttcgctgagaggcaaccatgtccagagtgagactcacgtcggtctgctgcatcacgtatcgtttgaagagctccactcgctttcgcttgccctgctctacctcgtctgttagacgagcctcttccgcatccgtcgagccttccaccttggcaatggcgacgacgtcgagccactctgcagtctcgggccgacctgcttgctcccaggcgttctctcgtgcctcttcgtgagccaaccaggcctcccatccagcccgatatcgtcgtcccatgttttcttccaaggacgactgaagaccggcgaccttttcttgttcgggctgcagaccagcgctcttgctttgcagttccgccaaagtctttttcgcttcctcaatgtccgaacgaagcgagaccaagagcgcttccgcttgagatatatccttttccttttgctgcagctcggtatcatacgatctcgcgagatcatccagcatcgtagtcatatcgcttgtatatttccccgccgcctgctgtgccgactgagagtggtaaagctgtggaggaaggcttccgaggccagctcgaaccgaactctcgccatcccctaaccggagttgtccaccaagatttggcgaagatcgaaaccgctcgtcctcgaggatgtaatcctctgcgcttttgctgtcacggttcttgatcttgggatcggctccgtgatcaaggagggctttgacgagacgtttactacgggcgcgagccgccaatgtcagcgccgtctcgccttcctcgtcctggaagttgatgacgtctcccaattcacgaggatagtcttccaggtgcaacaggatcgtttccatgtagtaccgagcggcatgcgtcttgcccttggtcagggcgacgtccgcgatatggtggaagacggttcggtttcccttgtcgatgttgagagtcgatttatgcagcaactggtagagctcacgaaatttccgcacgtcatagttgttggagaacatcacacttcgcatgagcgcggtctgctcggcatgattgaccctgaaaatgtcggcaccggctgacaacaacagcttgacgacccgcagacgtcccatggcgcaagcccaatgcagtgcagtgtgaccatcatcgtcgatcgagacgttggcgtcaaagtctatgggaggttccaccagacattcagggatcctagccttttccgtgataaagtagtcgagaatgatgttggcataggtctctggcccggctggtggcgggtggccattgacgaggtacaccgcatccgtgtccaatctggtcctcgaggacgaaggtgcagcctcgtaatcatcttcgactttgcgcttctgacctgcaaatgcagctccagctttcatgccatcgatgctgtagctaggttgctgctgatccgagtacatgcctgataggtgatcattgagagttccgagcatgtttgtcgttgcgggaataggcgaaggagtgcgcgaagaagacgaccttgatggcgatgcagtcgctgcaccctcaccgtccgacccctctgccccatctccacccatggccgaggaaggcataccggcgtctcccccatagctgctaggcccggcttgtagcgaaccttgtaacgagtacccttggccgatagggggtcccagcgaatggctgggtgtgcttctgccgcttttcacggagagcgaagcgaggtcttgcttcttcaacttggcctgagacggtttgatggagtgtttcggagcgggaggaggagttccagctcgcgcgtcaagttcgacgatgggtcggatgagctcgtgaatctcgtactgtttcgcgagcgcgatggctcgttcgagcggaatccatgttcctgcaacgcgaaagcagcgttctgtcggtttggctccaccaagaggtcagagcagatacgactactcaccctggctcttgccataaccaccctgaaccttctcatgaacacctttctgcacctcgcgctccagaatcctagttctctgaggcttgtcaaagttggccactttgagcagttgagtcgcgttcaaccatccatcattctgccttcgcatcaccagctccttgccgacgataagctcatacaccggtctacatcatcaagttatcaatctttagtatcggtctgctgatatccgggtcaatcgatgtcagactcacactccgcttttatgggggatgaaagggtcgacgacacgcgacgtgaagctcgggtcagcttgacgcgtcaaatgagtagggccgggagtgggagcatcacgagatgacatacctgtaggtcgcctgtcaatcaccatgacgtcaagttacaaaaggataagccgaggtcttgagctgtttacaagtctgaacacggtgcacatacctgatagaccgtatccggaccaatctccgccgacatggcggtctttttgcccatcttggcagatgtgagacttgtgggatttcgccgaacgatcttcctctcgggttacggctcgcagatatatgcagcaaacgcgagcttcactaatatgacgatctagacttcgagtcggataccaaggcgggctgatgagaacctgcctctgtcacaaagcgaccttactcttgtccagccgggacatcgacatgcatcaactcgtgctgttgctggaccgctgatcgaccgcttcctagcaggcgcgtcgcccttctccgacatttagaagcgcactcatttcaccttgtcaagaccatagacacccacggacacctgcatattgtattaaaaatcgttcatggcgtctgtacaagtcgtgtatgcatcaagcagctgtgcaagaggccttaagcaagactctggaacttttcaatggccaaacgcaaggtctcgatctcggcttcgattccgcgtagctgagagaaaagaggaaagagcgtgacgcgtcgtgatcagtcgcggactcgaaatcagtcggcgatcgaaccgaaaaccatcgtctcacctggtcagcgttcttctgacgaacgttctcgggcagcgcggtttcgtagttgtcttgaccttgcagcttcttgatcttgtcagcgttggtgtttgcgagcgtgaccttcttctcaagtcgaccgatctcctgagcggcatcgatcttgccctgcgaaagttgagtaggtaagaaaacggcgcgcacagtgctgatgacaagctcccgactaaccttgaccggaacgtgaacgatggcctggacactgatctgctcagtgccgcatccagcagggacctcactgtccttggtgacgatcttgacctccttgcaacccttgatcaatgcctcgaagatgggaacctgcgaagcgatcatctttgccgtctcctcgttgtcgacctggacgatgactgttgcgcacgatcgagtatgctcagcgggtaacattttgcgaacaagcatcgattggactcactctcgtgcctctcttcgggggtctttccgttagttggcaagccgtaagttgcgatgatcgatcgggcagcccgaatgcaatcgaagaccaagtcaaagtccttctcggcctggggatcgtggtactcggcccgctagaaagcgtagagcgtgagtaggctccttgaatgcaatactcggcaggacaacgctcacctctgttgggaagctgcacaacatgatggattcgctcttctcctcgggcctccttggcaatcgctgccacaagtcttccgagacgtacggcattacggggtgtaccaagcgcaatgcagactccagggcagtgtagatagtgttctggacagacttcttgacgtcagcaggagtctcatcggttgtgaagggcttggtagcctcctgttgacatagtaaaggcaatcgtcaatcgatgcccctttctcggagctgaagcaccattgacgcacgatgaacacgtcacagagttcgtacagccagaatccgtgaatggcctcagtaacatcgtggaagttccttgcctcgaatgccttgttgaccttgatagcggtttggttgagcttgtggaaaatccatcgctcagcaagggtctcgtttccagatttctggaaaagtatagcgacaactccgtcaggatctgttttccgatcggggcgatgtaaagtacgcacggcatcagtcttgttgggaacaaagtccgattggagtctagcgccgtcgatatcaaccatgtcgagcttgaacatgcagaacttggttgcattccaaagcttgttgcagaactttctgtaaccctcgacatcgttgatttgcagcaagatatctcgacctaatatcgtgatggctgccaagtcagcggactgtcacatgccgacggcaagcacgccgaatgtcactcaccaccagtagtgtagttgcacaacgcgaaacgcaacgcgtcggttccacactgcgggattcccttggggaatagcttcttctgcccctcagctgcccgcttgatctcggcatcggccaagtttcctccctccaactgcttcttgagcgcctccaaagtcgaaccctcaatcaagtcgatcgggtcgacgacattacccagcgattttgacatcttcctgccttcgggatctcggaccagtccatgacagtacacctcgttgaaaggcatcttgtcggtcaagacgataccaagcaaaaccattcgagcgacccagaagaacagaatgtcccaaccggtctctaggaaactggcggggtagaaactgttcatatcgggggtctagagaaatgtgacggttaacgacacggcctctagcatcgtcaagagacttcgctgaccttgtcaggccaaccctgaatggcgaatggccagagaccagacgagaaccaagtatccaggacatcctcatcctgctcgatggtgaatggtcgtccgtcggccatcttcttggcggtctccacagcatcttcttcacacctctcgacgatccagtttttgtcgtcagatggctgtggcgccgggtctcggatcagcataatgttggtgcgctgcgtcgcttctggagcaacgtacgtctggtcgcttgccatcgatgatcagcaaccatgcaggacacctgtgtccccaccacagctgtctcgagatgcaccaatcctgcatgtctcgcatccatcggtaccagtcaccttccgagctcttgggcagaaccttcaactctccagcctcggtacgctgtggacagagtatcaaaagcctgatcttataataggcgagagtggtgtcgtcttaccttggtagcttcaacagcggcatccttcaagttgacccaccactggggcttcatgatactctcgataatgtcaccggatttgctgttcgccggagcggtccgacgtggtaggtcagtccgagtcatccgtccgtgaagagcttatcaggacctacctgcagataggaatttgcatcggattgtccttggtctcgacataaagatccttctccttcaaagccttcaggacagcattcctgacgtggtatcgtttcattccctatgttgaactaaagcggtcagatacagcagtcgtttgttagctgcgcaagagacccaccttgaactgttccccagcgttgtcgttgtaagttccgtcgtcgttcatcaagttgatgaattcgaggttgttcctctttccacattcgtaatcgttagggtcgtgtgcgggagtaatcttgaccgctccggttccgaaagccatatcgacagtgacgccatcggcaacaatagggaatcgtcgatcgacgaaggggtgcttgatgtactttccgatcaggtgctgagaatatactttgaagcgtgagctcctacttgcaagttgctaaagtctgaaccacccaccttgtatcgctcgtcatctgggtgaacggcaacagcagtatctcccagcatggtctcgatacgagtagtagcgacgacgattctctcgtcggtgccctcgatctcgtaggcaaacgaggtgatggttccaaattcgaacttttccttgatgtcataaccgggaacgttcaagaaggtctttcccttcagttctttctggtcgacctgtgaacacattaaggatttgttcggatcctttagcgctcaaggtcttctcttggactgaaacggcctactcacctcgagattcgacagcgtagtgttcagcttgacacaccagttgacgagtcggttggcacggtacagtagtcccttcttgtgcagctggtaaaagttctctcggacggccttgtcgcatcgctattcacggcgagccattgacgattgtcagtcgtttgcttaatacttccacccagtgtatcccacccacttcgtcgagcgtgaacgcggtcctgttccaatcagccgaaattccgatcctcttgaattgggtggaaatcttgtcctggtagacttccttccagtcccagaccttttccaaaaacttttctcgaccgtaatcatgtcggctcttgccctctgtcttcagcagcctgttctccacgacggcctgggtggagattccggcgtgatcgaacccggggtggtagagcgtcgtgtatcccttcattcggtagtatctaatgagggtatcctgaagggtcgcggcgagagcgtgtccggtgtgcaaacttccagtaacgttgggaggagggatagggataacaaaggtgccctcatctcggtgttcgccggtgtagttgacgcctcgtccatcctcgatgagcttttcggtgccctccttgaaacgaggctggaagaaacccttggcttcccaccaatcgtaccaggcagcttctacagcgagagggttgtatgctgtcttaggcaaatcacccgagacgtctaagacatggggggaaagaggtcgtttcagcgagccaggctgttttggctgcttctgcgatgatatgctcacccttcttctctcccttgggagtcgtgttgacaaatgcctcctcgaccttttcctccttcttggccttttccttcttggtcgcaccggcaacaggagctacgacctgcttggtctgctttgccgcgagcttggcttgcttttcagccaacttggcagccttcttggctatttcgaaccgaaagcgatgaaggaactgatgagcaggtggtaatgacgatatcattctcccatatggcggctagcttaccggcgcttttggtttgcacaggctcgccatcgggtccgagctgaggtgcagcggttccttcgttggacgtttgaggtaccggggtctcggcgaccttgtccttcgactctgcgtctgcagacatgtttcgatactgaatcggcctggttattcgaagaggctttgagttgtgcacggtagtccgagcttgtgatatgcggagctgattgccttggctaaacgttgaagctgagcgaagcgagtttgcaagtatgttcgatcggaattgtcgtcctagctctctgagcatgaactggcaacaatcgtttcgagatggccagatatatgtatgactcgaaacttgactaggtaagagtcgagactgtgatcagcttgtatctgtgactcgaacatggacctacctttcatgaccttgtgaatatacctttgaactttgtcacctcgaccttgaaccttgtgcgcttccatttggcaattcaagcgcgacaccctgtcatagccaaacgtcaccacctcatcaaggtcattcaaacttatacaggttatagctgatcacaacaatcgatctgactcagagatcgcctcatcttgtcgaagagaacctagacattaacgcttttcaaaatcgacatccatctgaaatgacccgcgcaactcgtttcgtggcctacctggcccctttgatcatctactatctcttgaccctggtcggcatcgtcaacatccccttcatgtcgcaagaatcctcagacgctctcgtaccggtcgtaagcccccatatgtaattcatcagcgcgttcgtatctagtcactcatctttttgcggatgcatggactagctaccgttctgggttttggtcactttcggcgcttactcgctaggatcgctaggactaggattggtcaggttcagggactgcccagaagcctaccgatcgctcatgctggtaagcttgaatcgccgttcatcaagaggaacacatgtttatcagttctcggcgggcgtgcaggaaatctcgcaagcaaaggacgaactgcgcagcaaaggagtgaccgtagactagccaaaagctcaatagcccgggacacatccccccggtccggggatttacgacattttcacgacagaaccattcgtagagtagtatcagttgtaccaatatagacttccgacatatgaccagcaaggcagagacgatggaaattcgcgccattcatatgcttgtcgcgacctctcgcccgtaaatctttcgttattacagccgtctggactgccaggtcaagcaagacacgtctctctgcctgatgacgagaggaaagctttctacattccaaattgtgatcgctgtcgatttgggtatgatgggatcattagcatttggctaggactatttagcccagactcgctacgtagacttaccaactgcatcactcccgccttttgatcggctggtagcgcattgatctgctcagacgtcaacgatagcacttgtaacaacatggcctgaaatcaaacgactatgagctcagagtccttgtccgactcgccgagatcaacacgtaccctctggtcctcgctgaccatggagagagcctggctgatagctgggttcatgggcggtgtcgctgctggtggaggcggtgcaacgggggtaggacccgctgcgccgtacggactgttggtccccatcggaccgccgtaccccgcgccacccataggcgtgcccgctccatggggaggaggaggacccggtcggccgtacatattgggctgattgggtccaggacctgggtagccctgagggggttgttgttgctgaggaggctggatgggagggggagcgccataagactgcataggcatgggaggtcgaccgggtccgggaccaggcgctgagggtccagggttggcatacggcgattgagtgtttccgtatccacccccgtagtttcctgaaggcgtaggagccggttggaaagcttgaggaggaggtacgaatggcggctgtttgggcgtgggcgcttgaggtggtgggattggtttcattcgctatgttatcgagtcgatgagtcagctgagctccaggctcgcggcgcctctttaaaaaggactaacttgtaacacggtaggatcgacagcgttcatcagaagcatcgcttggaagagcgcgtaagccaactgcggatgttgcaagaaaacagcttttgcgccgtcggggttctccttcaccatagtctataccatccgaatgagagcgggtgagatgtgatcacaatatgtccctttgggggatgacgattcgctcaccttcatgcccatcaagacctcttccagcttgcccggcgggatcgaagccaacgtcttcgagatgacgtccgtcgctcgctctcccatcggcaagtcctggcctggtggtagcatgttcatgttgatgcccgtcgccgcaggtccgggccctagaggtagagtagggggaggtaatcctggtgcacctcctggcccgcctcgtcctggtccttgtcctggtcctggtccatacccaaaccctccctgaggtccactcggccctccaaacccctgcccaggtccagggacgggcgcacccgggaacccaccgggtccacccggtatccttcccggaggtcctggaggtgtgtttacagccgctgctcctgcaggtcccggtgcgccggcctttttaggaccgggttcgtccgtcgagagttctacacggaggctccgaccgcttatgtggacgtctttgaggttccggactgccgacagggcggtctcgtggtctagagttcacgcggggagcgttcacacacggagaaataggggtgagtgagcgggcttggatgatcgagaacgagcagctcgtgcaaggcttaccgaagtagtgacagaaaccgaatcctttgggtcggcctgagaccgcatcgaatttgaggctggaacaggttagccgattgatcagcttgcacagctccccaatcgtcattgaccgggacgtcttcttgtaaactcacacaaactcttgaaccggtcctacttcgctgaagatccctacgagctgttcttccgttacatcactacgatcgcggttgaccaggggcgacacgatcttgtcagtaaataggttcgagtcaaagtgaaaagaagcgggactgtctcacaaagggatgtttgcgactgcatgtacggaacgtcgagatagtcaggtaaccaacggataaacgatgcaagcgaggttagcgaatctgcttcgttcgggttatcacggtcaaagttcacgactagatgtcgaggttgaagagggtcgtttcgacaacgagatgacaagtgaccgtggacggcaaacgatgtcgagctggagaaaaggggcacgatagcaggccagatattcaccaaagatcgtcctcgaagtctgcagagcccgtgctttctcgtcgggaggctgtatccgttgtctattcatcatgtatttctggttgaatggactatatctcacaagtgagaatgatctagagtgagtaaaagtcgctttcgatgtgcaggaagagatgcaactgctctacacgatggctatccatagtagtaggctagatgactgactgccccgaggctctagatcacctgtgcattgacggacatgaatgcattttattaccgagtctcatggaccagatttcactctgatgtccgcttttcatcctctcgctcatttcggaatcttttatagcttccggttaggatcttcgagatttcaacagtcttgcgaggattcgttcaaaacaagaattggtacctagcaacgcagaacaatatggcaacactcgtcagctttgacactctttcaaggtaaacccgttgcaacagcccattaccatgtccgctgctgaaaaaaagaccggtctgcccgtgacacgtccgggagccgggatcgccgccatcaaggccgagcaagtcgagatggcgaaaccctccttatgtatcgtcgctcacccttgtcgttcgcttcactagataccgtgtataccacgattctcaaccaagacaggacaagcaggataatcaggaggaacctgcaggcttgccgagctttttgtcaggaggtacaatcgcagcgcctgcagagtcttccaccaagaggagtcgagaggacgatcgggatggccaggccgaagctgtcaactatggcgatgacgatgacgccgcggaagccggtggtgccgtcaagaaacaacgaggagatgacggtcgttcgcagatgcagaagatgaccaaagctgagaagaaggccaagtctggtcagaacaagggcaggaaattcaagaacctcaaggacgagatcgccgtctgttccctcgtcgcccggggcgaacactgcgcctttggaaacgattgtcggcggtctcacgatctcgaggggtatttcaagaacaaacccaaggatatccgactcatccacgggctcgatgagctcaagctcgagcccccttacgttgtcgacgctcccgctcccgctatcgagatcaaggaggacgattcgacgtcggacgttgctcggactcttgatacgacgacgacctgccccttgttcaccatctttggatactgtgaacatggctggaagtgtcgtttcctcggggctcatgtcaggcccatcttgacgtcgaacaccgagctcagcccctctcgatccgttgtcgcagggtacgagctggtcgtcgacgaggagaagaaagctcgagctttggcaagtggtgaacacgtcgagctgaatgacttgtccggagcgcaccagaaggatatcagaaagttccctttcaccaatacgatcccgtacctccaggaacacgaccctgattccatagaaaagcttcctggccaataccaaaaggcgaaccagaagaaacaaaaagttatccctacccctcgtccggctttcttgacggaagacatggacgaggaggaactggctaatgctggtgaagaccaagctggaggtctagcagctcacgtgcccatgagtaccgccaagcctgttgacgccgacaacgaggaggaagcgttgaacgagaagacggagccagaattggcaaaactgacgggggcagaggtcgacaaggacgatgtaccgattcgagccgtagagaagaggaggctcgattggaggggaaagacctatttggcgccattgaccaccgttggcaacttggtgagttgctacctcgtcgatgcgagtgatcatccgtcaacgctgctgatatctgaccatacttgtagcccttccgaagagtctgcgtcgattatggcgcggacatcacttgtggggagatggcaatgggtaatgccatcgtgaatggagccaagcaagagtggtccctaacccgccgacacccttcggaaaaaaactttggtatccagctttgcggtggaaagcagggatacatggtacctgctgcggaactcgttaaagagtactgcaatgaccgagagggatcgtctctggactttgtcgatatcaatttgggatgtcctatcgacctggtcttccagaagggagctggatcagcccgtaggtcgacgccgactccatcgtctacatccttgcagcgctaacacgatgctggtagtctttgatcgacccggtcaacttggaaaaatcctcgttggaatgaacaagatgttgggcgagattcccttgaccgtaaagttcaggaccggtatcaagcaggacaagaatgtcgcacacaagtttattcccaagtttgcgacggaatggggcatctcggccatgacggtacgctcgagcgatgtttcccgctctacttgtgaagctaagacgtaggctattgcagctccacggccgatctcggcaacaacgatactcgaagatggccgattggagctacatcaaagagtgtgctgccacccttcgtgaaagctgtatcgatgcggggcttcctgctcctcccatctttggaaatggagactgcttctcggcccaatcgtattacgaagaaaaggagaacagcggcgtcgacggaatcatggtcgcgcgaggggctttgatcaagccatggctgtttacagaaattcaagagaggagagaatgggatatcaccgcgactgaacgtctggatggtcttcgcaaagtcagttccctgtcatcccccttggcgacacccacctacgtctcggaccaagctgacctttgttgtgactcgcagtttgcggaatatggtttgacccactgggggaccgatacgcagggcgtgaatacgactcgtcgtttcctctgtgaggccatgtccttccagcaccgatacattcccatcggtctccttgaaaggatgcctggtcaaatcaacgagcgacctcctgcttaccggggccggaacgagcttggtgagccccgatcgagtgaagggagaaaggcgcagcggtcgctgattatttgtccatctcccttttagaaaccttgctcgcttcaggagatagccgggattgggtcaagatcaccgagatgttcctcggcaagcctcctgatagcttcaactttttgcccaagcacaagagtaacgcttacaacaacgaagatcagggttaggtccagcacctttcccaatcttacatggagttcttatgtcggcgctatgattgtcattcaccactgaccgttgtatgcttggaaagagatcaaattcgaaatgagcaacttgcagcttgttcgtgatccgtgaccggtgcaacacctgttcatcgctgaacagactgaaccgcagcagagtagttggccaaggaacgagcatgactcatcgcaaatgacgaaaacaaccgaacttctgcttccgctctgcttagatcgtgaggcccattagcaacccagatatcgtggtaggtcatgatgcattaccatttggctcagtcgctgtcacatcagctgtcagctacgtagcaaccagctgtgtaccaacgtaccaggtactcatcgactgatcctttcgagtatttatcccagagatgtccaggatggtcgtcgcctgcatcgagaagtggggagtctgctttcgctacacacagcaaacagttaatgtacagaagattcctctcgaccatgaccagccgccaacctagaactcttctccgacgccgatatgaagaggcacatgaacaaggtcccatccggatccgccagaccatagcggacaataccgaattcatgccctgtaagtagggctcggtctctgataccgattttgcattcaatctgacatcgctcgggcacagtcttgttgctggatgacttttcgctaccgaaaggacagcccggatttggaacccaccctcacaggggtcaggagaccatcacgtacttgctgcaaggaggagttactcaccaggacagcaacggcggaaagggacaattgcgaagcggcgacatgcagatcatgaaagctggtcgaggtgagttcacctttcaaaatgtctcgccggactatacaccaccgctgcaacccatagcttacccatctttacgtctctaaggtattgtgcacgatgaacaaccaagttacataccttccgatcccgaaaggggttggggcatccagctatgggtcgccctccccgaaacgcatctgaacgatgaaccctcgtaccaggacgtcatcgccaagaccatcccttccgtccagcctgctccgggcgtcgatatcaaggtcatcctcggtgattcgttcggtgcctccatgcccgtgcggaacagcgtcccggtctggtactttgacgtcaacctcgaacccggtgccgagatcgttcacccgatgcctgtgggtttcaacgtcttttgtcacatcctcgtgggaacgccctctatcgcgaacgagcaaggccgcgcgcacgagacctttttcttcaagcgggacggagactcggtgcatctggcaaacaagtccgagaaaccagctcgcttgattctagtcggtggagacccgatcgacgggcaagaagtgcaccgttatgggccatttgtatcgacaagcgcggctggtatcaacaaggccttcgacgattaccgaaaggtcagtacatggtcgtggcaacaaaatggcttccgcgcgctgataccacgaacctatcagggtatcaatggcttcgagagggctcattcgtggtctccatctccgatctctgcctgagacttgacacatgagcggatatctaccagtttatcctatagtacttgtacgaccctgatgcttcctttgtaagtgatgattataccatggcaaggaatggcaagtggctgcgctatgagaagtttggaatcggtcatctgaacgacgcagtgcccagtacgcataccccggctcgcttctcgatggcatatgattgttcgcaagtctctgtgcgggcttgttagccatacggtcaaatctacctcagccagggtctgccagcttgaccgggccggtcggacctgttagcgcgcgaagttgagacagatatatagcgccggctctctggccttcaacgattctttcgccagacggcactatacactacaatcaccaacgcaatgtacgtgttctcactcctgacagcagcgattctggtctcgcaggtgactgcgtatgcgaacagcgcgcttctcaacgcaggaccggtcgtcgaccttgcttatagtgtgcgtgcgagtcctccccgatgtgtgccgcactgtagcgcttatctgtcctacccatcgcagcggtttgtgggcaatgaaaccttaccgggcgtggcattctatggagctataccttacgcacgaccgcccctaggcgatcttcgatggaggtctccacaacagctcgatgagcggcatatcgcagagactgacagacctgtctacgatgctcgcaattttgggcagatatgcatacagcagccggccgtggtcggcatcggctcggaaggtatatagtcgatattcgtgtgcctcgttactggtcaagagctaacgactcgatgggctagactgcgtgactctcaacatctggaaaccaaccaacgcgacaaaagacagcaaattgccggtcgttgtttacatacatgggcaagtagcacgctgaaacccgttcaacgtaacaagccctccgctgactaatgtgtatctagaggtggcaattactacaatgtaggtcatatcgcaagtgggacatgtacaaccatgagacttagactgactagactctagtcagcgcaaggcttccctatgggcgactgggttacaacagcaggtacggttcctgagtcggtgtcacttttcgacttcgctcatcagtagatgggcttaccagattatcagatcatcgccgtgagcgtccagtacagagtgagttcgcaaggcttgcacaagggaaagatgatcggctaaaaagaccgtacagcttggactcttcggattcttggcgtcggatgctgtcaaggcagatggtagcgtcaatgtcggtctgcaagatcaacgcgctgccttggagtggcttaccaggcacatcaccgcttttgggggcgatctggagaacatcacgatatcggtaggtcgattgtgctgagagaaacccgaaggttttgtgcctaatgatcatcgtcatcttctagggcgaaagctcgggaggcggatctgtgttgaaccatttaatctggcaaggcggtgaagatagtccgccatttcagagagcggtaagccacctgtcgcgggacgtagtcgctcgattacctgtttactgaacagtggaccgccagatccttcaaagcatcggcaatgaccccgtcccgacgccagaagtctacgaacagtgtttcggtaacgtgacaaaagttgtcggctgcgatcaagcgcaagacgtgatggcctgtctccggtcgacagccttgtcagcccttgtcaccgcgatcagtaggtgtcggactttttaacagacgccgttccgattttagcccgaccttccactgataaggttgccctcggctcattttcagaccgacgtccgcagcctctgtgcaagtacctaccgatgatcgatggaactcatatccgcgggatcccatctcaggaattctcagcgggtcgattctccaaggtgaatcacgacgcacgagacacatctcgagtcctgctgacaacgttcacgtcaaggttccggtcttgagtggacacactaccgacgacggatcgatctttactggatctgccgagacagtcaagaatgataccgcattgtacgccgccctgaccacatctcggtacacccggctggtgagtcgtcgcacaacggtcatcgagtccactaactcacaagaatgagccagatcgaccacagacgtacgagacgtttcaacgagcgagagctctctatccgctgagcgaattcgagtcttactatgacatggcaaagacgctcgtcggagacactcaatttacatgttacgattggtttgtcgcgaagcagacggctaaatatggacaaccaagtttcaactatcggtaggttggatgttgcgactcgtatggctcaatcaactaaagagacgggatcgtctgataccagatggaatactcctggtgcgtgcactcgctcggtgactgtcgtcagaagccggttctgacgactttcccttgcctttgagatagaccccgtccagttcgcctcgtccccatctactggggtgagacatacctcggacctctactttttgttcgatggtaccaagtgagcgacaggcggcccgagcggtcaactccggcgtgaaaactaattgaaacccggctccacggcgtctcgcagctctggtgtttcatcctccaacgcgcaaagtaggtgatggcattggcacgcaatgtgatgttcatgctttctcccagctgaacggtccggcggcctttgtagacgtgttccgggcgttcaacgcgaccgagcagaggctcgccacggaagccgtctcatactggacttcattcgcccgctcctcctctccatccaccttcaagccttcggattctcccgaatggcccgagcattcccctagggaccagaagggggcacagaggatcgttctccagatcggtaacagtggacaaacgggtagccttgtcgagacgctgagcgagaggtacatcgagcgttgcttggtgagtgacggcctcgatctcgaagtgctcagttgccaggtcaaggctgacacggacgagtagttctgggtcagtgtcagtaatgaaacgcgagtctgagagcagacactaggacgatctcggagcttcgtgatcgcgttctcggtttcaatgcatatacgctaccggggtcggtcttgggagcaactacgcaatgtcgaatgccaccttcgtcccccggcgagaccgaggacgacgctgcgccctatcttcttgccccaatggccagccacctgatccctgaactgaagcctgtcgttgtaccagactcttgccggcgttcgctcgagccgatgcttgcaagacatgtgtatgtatgcccgacctatgaatacctacaatcacgtacccctatcacctcccgccccgtccatagctctcgattcgactgttcaagcgctctcgcgttatgtgaaattagatcggttgtaattcgccccgctacaaaagaaaaggacgagggatcagcgatcgggaccccctggattgatgggaaacgggacgggagatgaggcttacccggctttcctgagctgggagacgacgtcggtctgtaaatcccgggtgtgaccaaacaagaggatcgacaacgagaggaagaaagaactcaagtaaaagagaaggtgaggaagaagagacgaggaactcggtaacgtattagcgaatctgacgcgtgatcaatcggatcgagacgaccggccgtagcgcacggacctctttcagatcgtccttcgagctcgcgttcacttcgatgctgtacgtccttaggacgttcttgacgtctgccgcgtggaccgagacctgtattgcggggtcgtttggtaagcaaggtgtgatacggggagatcgggtagggctggacttgctcttgctcgacgcatcactttgactggcggggatcaaggacatcgggcgtgggacgcaggacattgaattcagcctgcaccgtaaagaagacctctcgcttgaatggcgactcgctacgactgaccgtttgatccgataaagatgacgagtacaaacttttccctgaaactctgttcgtcgttctggtacttgaccctgacgtagccaaagctggctttatcgtcgctcaactcgctcgcgaggtcctcgatcgatccttcacccgtcttggtgagagtgagtttgttggaagtcggggaatcatagtcgaggagcaaccaggtggtcgagtccttgtcggacctgaccttgtcgtaggctgcatcggcacaaacaaacagcaagttcagacggagctcgtgcgggtaatcagtccgcggcaagatcacgactcgccttcctggatggcggtatctttgacgtcggccatggttaggattcagtgagcctcgggccgggtgtttagcgcaaatacagaggtgcgacgacgacaacgattgacgattgaggaatcgagtagatgtacgatgaacccggctccgagtcggtccagtccacgtcggtcgttgtggtccgaggaatctacatccgacgatagtggattagcttccgagcgattcaggcggaatcaaatcatttacttccgtctccctccccctccctcccttccccttacaagcgcgcttctgactctccagctcgacttgactctcttatcgaaacatctggcaacagtgtagagtagagtagatacagattgccacatccctttcagcatcaacaccataccacaactcattcccttcaacacacgactctattcacaagctagactaccctcactcgtgactcttcgtaccatcgcttcaacatgcctggacctcgactcgctaacaaggtcagttccgcgaggtcgccggcgggcagcataacgcaatcagctgacgaatatcccatgccaccattcaatctaggttgccatcatcaccggtgccggatcgtaagcctccaccaaacccacctctcactgggcacacgatgtgcttatccgattgtcctcctcgaccaccagcggcatcggtctcgaaacctcgctcttgttcgcgaccgaaggttcatccctcatcctcgccgatatcaacctcgaagccgccgaacgtaccgccagcttgatcgagaacaagttcgagggcaagatcaaggcgttcgctgtcaagtgtgatgtcagtaaagaggaccagatcgaggccatcgtcaagcgggccgtggacgagtttggcaggttggacgtcatggtgagtcggcgagatgataagccccgcacctcattcaattggctgaaccgatgaaactccatccgaccgacctacagttcaacaatgccgggatcatgcaccctgctgatgacaatgcccttgtcacggacgaaaagatctgggatttgacccagaacatcaacgtcaagggtgtctggtacggttgcaagcacgccatcatcgccatgcgacaggtcagtcatcgatcgtctagtggcgcggactcggattcgaggactcggaggctgatcggtcgggaatgtctttcggttgatacgggttagaatcccacggacgagtcaaaggggttgcgagtcggtggtagcgtgatcaacacggcgtcctttgtcggcaagatgggagccgctacgcctcagctcgcttgtgagtacacacgtcgattcgtcggaaccttccgaacgagacgctgacaagagcgcggcgtcgtttctcgtagataccaccagtaaaggagccgtcctcgccatgacccgggagttggccatgatccacgcccgtgaagggatccggttcaactctctgtgcccgtaagctcgatacttgtcactacccgtaccttgacggcgatacgatcactgacgcgtagacgctgtcgactcgtcagcggtccgctcaagaccccgctcttgatggatttcctcaacacgccggaaaagctcaacaggaggttgaaccatttgcccatgggaaggttcggagaggccatcgagcaagccaaggctgtattgttccgtgagtcccggcatatcgtcttatgatcgagctcgatctcagcggttaggccgagtagctgatgcattcggtcgtttcgaattcgggggtcgatagtcgcttcggaagattcttcctacgtgaccggacacgacatgctcgtcgacggagggttaacttctgcttatgttgtgcgtatcgcttgcgtttcgggatggcaagcgacagatcatcgatactgactagaagcaaatcggttacagacggcggagggacccgtcctcctccctcctcccgtcagcatgaccgcccagttctagacaccagcgagacacgaaacaggacaggcgcacattaccattctcacgtggatggtgaaaacatggaacgcaaaggaatcatacaaaggaaaacgagaaaccaatatatcgccacgcatgcactcgaatttttacggatgaaacgacgacgacgacggcatggttcgatttgggagattctggacgggattctcggcattgatattagtatatgggttgggcttcatgacgtactcgataggaaatgcatatttcgtctgagataacgaagacggcagtctcgacacttatgcccgtcaaaaaaccattgttgctgtacctcatcgggtaccgttgagccggagagtcaatatgtcggagtctgactcggctcggcttgatctatcctgcgagtgtttcgcgattggctgacatataccatcagcctcgaaatttgaacagaatggcagatgtgatccgagacgacagaaggtcgagcgacttggctttcacactgcgcactcgttcgtcttcagctatacaacatcccgtcgcacttccatcttcctcagcttcaccccgccctcctctaagatcctggcagatgcttcttccatcgcgtaggacaagttgtataccacctctcgcacgccgcactgtacgatcttgacagaacatgtgaggcaaggacatctgcgacatcgacgcaggtcagatcgggcgttgtaaagaggaaaggggacgagagagacttgcgtgttacagtagatcacactgtcttcgcctattcgctcccgacctgcttccagcaaggcgttctcctcggcgtgcaggcacaggcatccatcgactgcggaaccgaaaggtcatctgtcagatttgcgcatttcgtctcgctgtgaccctgctactcacgtccttcgccacctctgctagccgtattacatcgcttacaacctccttcgttgcaattcctgacccctctcggtgtcccgttgtatcccgtgcttaagatccgtttgctccgaacgaggatggcaccgacacggcgtttcatacagtttgaccggagtgacgcaagacaggccaaggtctgccaacgatgcaaggtctgcaatcagcttatgtggagccatatgtactgtgggtataggacaactcgccataaaataaccgtcccagcccggtctcaatctctccgaatcgagcagattgacttcgtccaggtgccgctccagttcaggtatcgccttgaagctgttcatgatagtgagatgagcgtacgacatcagggcccgcagacagctctttggcgtggtggtcgggatatcggatgcggtcggctggcgggacgttgccgtgttcatgagctcgtcatgctggaacacgaaatcttcgagtgaaaccgctgtaatgtcattcggagctctatacggattgaaacagatgtcagtccatctcaacgaccatggttagtgacaccgggactgacttgttttgtctcctcttccatctcgtcatcaacgggccgtcaaccgcgacaaccagcactgagggcctcttgatgaaaggacgcagctctgcctcggaggtaaggcatgtcgtcacaaaatccgacttccagttttctgtgatgtaatcgaggaggtagttgttggaagggaaaacattctccttgttgatcgaaggtgtaatctgtccctactaagggagaacgtgagatcggctggagatcgatgataaggatcggacgagacttactgctttccccgaaatttcggttcctactctgaggaacccatgcttgctctccaagtagtgagcgatcgtatccttgcctgaaccgggagtgccgacgagaacgatgaacatggcttcggaacgaatgtctatatgattgacaggggtatgatttggttattagtcagaccttgggtgactatgcagaggtcaacttcaggaggcatacgagtcagtagagtagtagaaactgcttgagcgcgagatttgacggggagacctcggtcttaacttgacagcgcgatatgtcgaccaacctacctatactaacaacctaaccatcaccttgattggcctgcagttctagggcagcctctatactctcatactctcaagctcagtctatagcgcatcctaacggacgtttaatcttctcaaatcctcacccgcaaggcatcattctagactcagcttggttcgggcagctcatctcatcatgaacgccgataccgtcctcatctacctcgaccgggctcggtattacgcccttgacgctgtgtctaccatctcgcaatgtctttgcaggcccgatgccactctcaaaataaatggccgtacttacaaggtcgagaagttgcttggcgagggaggtgagctggacgctccctttcgaacattcctattgagctggcagctaatctcgactcgcttcaatcactcgactcttaggtttctccttcgtctacctgattcaggacacctcgtccctgcgccactatgcactcaaaaagattctcatctcctcgagctcgggagtcggcggtggaggaggagaggaagctctaaaagaagtcatgaaggaggtcgaggcatatcgacgattcaagcaccccaacatcatcaagattttggatgtggcggtcgttcagagcgatgaagatggtggtggtggcaaggtcgtctacctgtgagtcggaaccctggagacggatcacctagggtgactgctgatctggcctacacagctttctgccgtactaccaggtcagttgccgatcaagcattgttcagtggcactccatctgacatgctaattcattctggtacagcgaggaaaccttcaagatgtcatctcccatcagtcgatcacgaaccaacgcatgtcagagaaggagatgttgcggttgttcaaaggcacctgtctggcgtaagtgaacgcttttagctgcggaaggtcgccctagccgtgttctatggcggattgaagctgaccatatgtaatgacttttcgagcgagcagcgtgagagccatgcacaaatacaggttacccaacatcccccaatcttccggagccgagtcggagaacccattctctaacccgtcgacagcgttatatcccccgaaatccaagttggacgtcccgacactggagcgaggagactcgtcgaatgcgttggaaccgctcatcaacaacgggcaagtcgtattcgatggtgacgaagaactgattgatgagcagaacgagcgatcaagtcggcctgacaaggggaaaggcagggcgaccgatgaggatggccagggggagttgatcccgtatgcacaccgagatatcaagcctgggtgagtcgccatcatgttcgtccattgcctcaggcttacagagacggcatgctggtaaatagtaatatcatcatctcggatgacggtcaacccattctgatggacttcggatcagccaagaagcgagttgttgtcctgccaggtctggctaatggaaatactgatcggctaccgatctatcgcagagctcgtatccatattgttacgcgacaagaggctttgttggagcaggatgtcgcggcagagcattctacgctgccttacagagcccccgagctgttcgacgtgaagacgggttcctggttggacgaaaagtgtgacgtttgggtgagtctgtttccagtatcgcctcgttggttgataactgagctgattccttggctgtgctgaatcgtagtcgctcggatgtacgctcttcgcactggcgtacgactactcgcccttcgaggacccgtcgcaaggtgggggatcgatagccatggcagtaggaagtggaagattcaagcacccatcgaatagcgagtggtccaagggcttcaggtgagtgcggcctacttcaggtttgccggccgctagctgatccacgtctcacggcaggctgctgatcgattcaatgttgatccacgacccggcgcaacgaccggacatcgacaaggtcatcgaattgacggacggcgtgatcaagacaatccgataagacacatgagaaaggtggatgcaccgaaacagcgacggagcttcgaggtctatgacacggtctacgaaaggcattggtcaggttttccggacaccatctccaaatcgattgcaatccaacttggttttcctcgaccattcgtgttgtgttagctcgattacgtacaactgatccacgatgcgctgtcttgttcgtctatcatgagggaggtactctatccgtaagggtggtcattgttcgctttcgctttcgctttcgctttcgctttcgatgtcggtgtcggtgaaaacagcatcgtcgctgtcttcggtgtaaacagcatcgctgctgtcttcttcctgtacgtcccactcgtccgcctcggccgagacgcgaggcgttttcacagcccggaggagctccctggctgagctgacctgttctggcgtcgggatccgttggttccagtcccgtatgttggccaagagctttggccaaagatcgactcggttgctttcggagcgattgacggcccaggcgctcccactcaggttggatcgcgcagcgttccagttgaagatgaaccgacggtcattcaggtttctactgtcagaaaacccagaggtgtgcggcttgttgtggtcgagccttccgagcgtgggtgcgtagggaccccactgggtgacatcgaagctgatggatggaaacgtgtagtccgtcatccagagtttcttcccagcgatatccgtgacgtctttcttgaactgtccatcgttgaacgctttgtgcgcatggctaaggacgacctcgaagtacgctccggcccacccgtactcgcccgcgtagaggatgtctccgttatcgtaccgtgcgccggcatacctgctgctccagctgataagatcatcgatatcgctgtcgccgccgggccctccgagagtgatgatgccgtcgatgagggcatattcaaaaccgaaaccgtacgtctcctgaagccacacgttcaggctctggcacaactctcgaaggacccctcttttctccgccatgacggtaacgcctccatgccgcacagcccgccgcaccgtgtaacgggtctgcgtctgccctcttgactggaggtcgaggtcgatgtcgacgggaacgccgcaccgggggacagcgaggtcgatgtcgacgggaacgccgcaccgggggacagcgaggtcgatgtcgacggggacgccgcaccgggggacagcgaggtcgatgtcgacggggacgccgcaccgggggacagcgaggtcgatgtcgacggggacgccgcaccgggggacagccttcgcgaaccgaatacccaagacgtccaaaagcttcagatcaagtccgatggcgtagttggcctcatcggcagtcatcttggctctcaattggcgtcggatcggacacagttgacctctggcgatatcccgagctagcagccacaggtcgggtcgagatcgacctgactgtaccagtaagatcaggtttaggccgaagactgcgaggtagtcgggtccgtggaggtggttctcctgaatcgacgtccaggcgatattctccagcgagtgaaacccgaccgaaccttcagccttagcgaccgtgccttcagcttcaaagggttggcctccagccccaaagaccgtgcttgaagccccaaacacaccatggatgtgatcaggggatatttttgccgcaatctcgagcttgagggggtagctcgaaccagtcaaagctccgtcccgcaccgttcgtagactgcacaagttaccaccagtccaggcgttctgcaagaactgttggggtccagggatctgagtggggtcgggttagctgtgccatgcgaagagcccagaatatcgctcaccaaagactcctcgaaatccttagccatctgggtcatcatgtcttcgagttcctggtgcgtaacaccttcgtgccgggcagcataacggccctggatcgctcttcgagccttccatagcatgaccgtagcggtcacgtagcgggtccgacgtggaagcaccagttgacctgtagcacgagtagctaggcgtttcttctggccgtcggaaagtgcgcatgggtaagtctgcaccatgtgttccatgacctgttctcgacgaactgcgagtgagtctcggcaaagaagggcaccatcgaggagagagagagagcttacctgctgcacggtcgttgctgtatcggcgtacgtcttcatctcggctacccagcttttgaccgtggccgactcggcctcaccctgtgggatggggaaactcagggcatggcgagtactcgggtcgaacggacgggccgggctttgttcggcaggccgggctagcgggtagacctgcatgcggaaggtcttgtccgtcggtctggacggcgcacgatacgtcaccgacaccaaacgctcccgagtaaccgtttgctgcccctccgagcgtgtatcccactccggtattgctgtatataagcttttacctggtccctgctccagccgagcttgagaccgagagtggcactgatcacgacgaagctcgctagccgcaaagcttcgttctcgtgttgcaacgcagcgagatgcgatacgccaagattggcgtaaggccgaagcaagtcgacggcttcttcatcatttgcgaacgagtacggcgctttagcgaggtcaagcggaccagccgtgatgtgggggcctcctggatgcgtcgccacatatctatcgtttcgaaagatgtgggggagatcctcgataggctcgccggtccattcgggcagagtcgtccagtcaggcaataccacagcaacctcgtcggatcggtacgagttgcagatcagtggagcgaactccgttttgggctggatgatcttgcgggcagcccgcatctgcgccatgacccgaagccggacgtctcgagtcatatgatcttttttgcggccatctttaatcgaccgtttcttgagctggggctggggctgacgagatggaccaggctggtcatcgtgctctgtatctcggtcttgcactgcccgaagagtcggtcgcccatttgggagaacgggcaggttgccaacgaagaagggattggcttgagccggcgggtcagaatctttctgactacttggagcaaggacatatggctgtcttgatatggtaggcgggaaggtaagaatctcgaacgcatcttgctcaaggtcagaggagttgggtcggctgggggacttgttttgatcgaagttgtcatttcggtcaacgttggcaagtacgctattgttggagatctcctgaagagctcgcctgcgaggcgcttttgatgagacggtagcggtagtgtctttcgtccgcctagatgaagatgatgggaactcatcagataaatcgttgtcgtattcttccagtcgacgttgtcgaggtcgaggtcgaggtcgaggtcgaggtcgaagtacttcgcgtgccagctcggccgacggttcggcgactactcgagcattctgagcttgctgctcgagctctgccactcgggtcgacgacggacactctcgttgaatcgaccgggaacgagcggaggtggtgaaccggatgactttcgcttccgagagtcagccatcgtgaaaggaagagggcaggaaggtggagcagaacggaacggaagactacaaagctgaagctacaagggatgtcaccaaacagatgcgagacaagagcttgaagatgccaagatcctcggaaaaccggcctcgcttctcagcgagcttgaacgggacgcgaatgccacccaggccgctctcgacgcctatgagcaggaaaaagaggccaggaaggcggctcggagggttgataatgacgaaaagaagcgcctgcagcaagaacgtctcaaagcccgccaaaggatctatgacaggcgaaaagcggcggagaaaagagccgccaagctcggcggttccgaatcgggatccgctaaggtccaggaccgcgagcacgacgataggcatgacgatgttgacgacaacgacgaccgcaatgacgatgatggagagggaaccgagatggaggatgagggagtggccatggcagacgagatggatgcggacgataggattgatatacggacggatacgaacggcggggagtgagtttctggccgatggtcacgagtaagtctcctcgcatcagggcagatgtacgagcgagggtgcaatagctcatcctggcgtgacagtcttcttgctacgacattctttttcttacgactttgcggtcaccacgcttttggttttcccaacctctgttccaatgtatggcctttgatatgacttcgatgactattcccatgacacaatcggttagaaagacatgcaaacattgcttcgtaccttttctttctatcgtgaggctgttctgtcaacatgtcgcggggcttcgagactttcaactttcgatagcgatgacattgactcgtatttggcgacaactggccgagatcggcgtacagaacggctttacaaagtgttgacgttgttcaactccttgcaggcctgcttgacacggtctcgcatggtgacttcgccagttcggatccagactcgctgcgaacaggcagagaaaacgctggttagcgcgcggggctttctcgatcaacgcgtacaacacaacacatacagggtcgtatttgcccttgttaggcttgtcggcacccctggtatgcgaaaagcaaaatggatcagtagatattcgggaatggtataagggatgatatcatagctactctgggtttccaacctgactgtgaagtcgtgaaagagcgttagtacgcgtgccgtaacatccagatcgattcaacgcgactttacttacgacttcaagtactcggcattcttcgagaagtagtctcgcataccaatcatgaagtggaactggcaatcagtatcaacgttcatcttgacgactccgttggtaacggcctcctggatctccgcctcggaggaaccggaacctccgtggaagaccaagaacaagggcttctggtcgccgttgttcaactgctgggcggcgtactcctggtgctttccgaggatctcgggtcggagcttgacgttaccgggcttgtagactccgtgaacgtttccgaaagcggcggcgatggaaaagttgggcgagacctcggcgaacgccttgtagacgtcaaagatgtcttcgggctgggtgtacaggctggcgttgtcgacctcggagttgtcgacaccgtcctcctctccaccggtgataccgatctccatctcgagccactggttcatcttggccatcctcttaaagtacttgacgcaggtctcgatgttctcctccttggactcttcggacaagtccaacatgtgcgaggagaagagggggacaccgtgctccttgaagtaggcctcgtcggcgtcgagcattccatcgaaccagggcaagagcttcttggcgcagtggtcagagtgcatgacgacggggattccgtaagcaggggcgacggctcggacgaaagcggcggcggccacggcaccggcgatcgaggcctgctgcttgtcggcgtcgttcttgattccctttccggcccagaaggcggctcctccctgggagacctggaggatgatgggagagttgacatctcgggcggcctccaaggcagcgttggcggtggaggaagaggtgacgttctgtgaagcgcgagcgaagggtgaagttgggtcagtcggggtattacaggacgacgggtatcgagccgtgcactcacgatggcctagacaagatggatagacgagtaatcaagactatttagtcgtctgtgaaaagagtattcctaacgcatagcttcgacttacagggatagcgtactacgagaaaaagtcaccgggatcaaaatgtcagcaagtcgtccacagtcccccccatcaagaacaaacgactcaccttgttctcacgagcgtgctcgaacaacttcctggtctgctcaccagagagaacgccggcctgtccatcattcgaattcgcacgtcagttttctttacctccgtacgtgcccgcccggatgcttcaaacccgaacttacagggacaacgtcgagggcacccatttttgatagtttgtttttgagttggtttggtagttttggtaggggaagaaagtatggtatggcaacaacagctctgtgattcgacgacaacttgaatatggagctcaaagtatataaactgtaatccgtgggtgtggggtgtgctggccgtgctggcaaaggtggttggttgctggacattcgttggtccggctgcagagcggaaacgctcccttgccctggcgccttggccgtctgcgtgagcggaagcggatatgccctcccccatcgtgatgaaattcatcatcatcatcatcagcttgcagcagtgaccgtctccctattcgctgcccccttccccctctcttcccgcacaatcgcaaacctctctcgcgcgcgcgaggcccagtcgtcacgggttccctctttcgcgtaaaactgccagccaaggcggaacgagcaggacgattgtacaaccgattaccaccgtcgacgtcagcggaacgtgataacaagcatgcaaagatgcaggcgaaaacaaggaaagcgaaggagaaaatcgggaacaggccagatccatgtaggttgccgattcttgcggaacagcgggttccaaatgtcgaacggagccgtctttgcgatcctgcccccgaccgatgtaacgatgccacggcccgaacaacgggcctcgtaccggaagtcgacggcccgagcaatccaaaacagaaccgaaccaaaatgacaagatgcaggagtttgcgatcgatattcgagcccatcgtcttctccgtaactcggcgccgagcaaccctcgccttgcctcgacgcaatacacacgattcttgacgttctgtacatctagccactatctgaactaccttcatagccctgaagctcaagctgccagcgaaagctgatgcggcccctccgaagaaagaaccttcgatctccatccgctctccaatagagataccacctcgatccgcagaatgcagactcggtggccgtccgtttttttcgaagctccccctcctcaggtgttatgactggtcggatgggggttcttttggtggacgagagcgggcggtgaagaaaggggtctcaaagaaggggttacgttcgtccggtcgtagggatcatcacttcgatccttcttgtactgcaagcccgaccacgcctgacgtgccggcctagttgaaaacgctggagacggaccaaaaggaagcgcaggaacgacgatcacgacgcgcgtatctcgcatgctttcacgtgatatatgcctgtagaccacgcgggtttcaagcggacccttcctttcacggcgcagtttcatcaagtcgtcacgtggaggcagcaggctttgatggatctagtcgaccgggcagggtataaatggatacgtcgaaaacaatgtaacatgacgggaagaagatcacaggcagaggactcctttgttacagaaaatgactatagtctcctcaagacttaaactggagccaggggccctgatggactagaaatcgcgcagacttaatactgtatatcatatgtagaaagccattcgattgctcgtactttccgcaggtacttcggctctgtgtccctcctagatgatgatcatttcgacgtacgcgccggcttgagaactacaatttcgaatgatgtggtctagccctctgctaggtttcgcgagttcagtgcctgaccttgcataaagctttcaagagcaccccgtgtgaatcctatcgagtaatttcgagtagatcattccctcaagcccgactcataactcaaaggtcgagcggtaaaactcttttctgatttaggccaacttccctcgagagactggacatgatcgagatatgaaaagacttccggattcgccttcgcttgcctttaaaaccttgccctggaccaataccgctacaaggcacttcgcgctagtagaacgatttcacatcatgtcagactttggactgtagcgggtttcatactgacggcctcctttcatgtgatgatgcgatcgattcgcacccgcagaaatctgggacacacctgctctcaacgtcagctgaattagacactgactatataataagtgacgcggcagcacggcactcgcgatcgttttcatgaccgattgtcaaggcctattgtgaacgcccgacctttctgcctttaccaatttcatcagaacgaccgatgtcatatgacaccttaagtgatgcaaagaaacaacatcaccgaagatggctcgcggcagaggaagtgactttgaagcaagctgatgatcagattgtgaagctgaattgggtcgcccgacagaaggacgtagatagaggcgcaaccacggccacgagggaatatctgagcctggaagatgccaagggccatagttacaacccaacggtctacgtagatttgggaggagttctgaaattcaagaacattgcccttagcttcctggtcggatccgggtcactagcagatgcgaaaattaagctacctgagtggctgtgcgggcctccttttgaaacgatatgccaacgtatacatggagcgctaaggaagcacgaacgagccgttaagcaccactcaccaaaatcgcgtaaggtgagaagaagaagccaatgaatcaaacgatcaaagcttatgaaagaaactttgtacgtcaggttgaggcaacaaaaccaatcgccgagagatcatctgcggactcattcgagatattgccctcggcgagttcgcatccatctatgctgatgtctgcattttcgaacgcaggagagtgtaccacgcttgctcctccctcgcgatctgaccaaaccagcgaaccttctctgctggcgagcgggcgcgaacgcttcgaggtcgccggaggcgcgaacgtcggatggtattctgatcaacagttccgaatcaataccagaatacgtgacgagagattccgttacggtgtttcagacgatccggtgctgtaccagaacactgcattttcgtctctgaacgcttcctccatcgacgatctgtcatattccgatcccgaaccccctcaagttccgtccacctccatatttacgtcagaaactgtacaggattcgaacgaggaggaacgtctgaatagcagcggctaccaagaatccccaaaacatcggcttccgttgttccgagggacatgcattcctccttctggatctcaagcggctccttctggcggtggaactttcagcgagtggagtatgtttattgaaaattcagatcgggaagattaagagtcgccttcgtcaggacccttgcaaaggacgaaatcagtagtttctcctctttatcggtcttgatggatctgcgctttcagtaacaccatcatttcttcatcacattagatcgacttcacgtgcactccttgaggtccttgcaaaggaggtgctgtttgaggggcacacgaacctcctgtcagtttcgtcatgtgttcagagacgacttcaatgagcagtccggtcttccctacaagatcccaagacacggactcagcttccgctctagactatttcttctgaggctggtcgaatcactgggtttgatgcggtcgatacgaaatcgcatcattttgacagaccgtgcctgttacctatatgtatctttttggaccgttgtttgagagagtttcatgactgtgccttccttttatgaaaagcttgttgctactcagcgatgacgacttgctctctagtcgggttcgggaaagcataagtacaactagaatcacagaaagatggtctataaaagtgatccttggaccaacgtcgctcagtcaatttgagtgcgacgagcccgtcagaaccaaagataatcaattctgggagacaagccgatcatgcagttggacgatgggaagagaaaattttacagtggagccctgaatcaccagatcagggagtgtactaacagcgatggacagaaaatatactctcaatggttcgctatcaacgtgaaacctggtcaagtgcgacgcggggtagtaccgaccaagaatatgcgcttggtcttgctcccgatcgaggaagaggacagacaaggcaaccaccgccaccagccacatgacaaagaaataggtaacggcctagaatacctcaaagtcgcgttagcattcacatcgagcggtgctccggtatttcaagatcggcccgagctacctgggtggatgagtcacggtcttcagtctgccatactggcggagtggagatcagcatgcaagtgtaataaaaaaccaacacagctggggagcgaggtgagaccgcaaaaccctgctctatcacaaacgctcaacctgtggctcatcgctcaagtccttgatttggcttcgaaaccattcacctgaagggaagccgttagaaagcacaatctttggaacgcttagcccgattccgatcgaaacccttcccggatcgactgttcgacgctccctagacctttcagataggaccgataaaccatcggtcatcgcttccaaaggaaaatcagccagatgcgattcgccaagtattccgaccctcgactcgttgctgacgtaccgcttcaaaggctaagcgggaaatctgatagtgatgaagaggcggtatcaacatatgtgactgcgttgttcagtcctttctttccattcgtctgcgtaaccggaacgatccacatgacgcatatgcgctcaggccatgcttttcgagactcccagattgatgaaagattccgacctagctcgttatgaatctccttcgatctcgcgcgattgaccaatacttttaaggcttcactagccatcccagcctgtccacgaacgtcagaagttgaatctatgtatctctgttcaatggacttttgtgcggagaatgcaaaactcaaagagatatgcacaccgcctggcttagtctcaacaaggtgtcggcggcgttgaataagcgtggcaacggcaatcaacttggatatgctagccttacccgtccgtcgctgacagcatcgtggactgtgtggatacccatatcacgtcgaaattccaagccagtcatatccgctttctggttgcgctccaaatggcctatggggggcgtgccttgccgaagtgttcaggtaccaaagcacagctacgacgggcgaccaagcaggatgaaataaccctatctgcctcatcagaatgcattgtgtacgaggtcttcgttgtgctggatcatcttgtagatcatcctccggtgtcgagtgtaagtgtccggctgacaacgagagctctctgatgtggcacttcgtcgataacacataccgatacctgaaagtgtccgtgtaaaggtgcagtctatctacacggatactctgcggacctcgtgatttgaccattccaattgctaacctaaattcaatctagattggggtggctaccgaaatcgttcccggtggtaatcgcgaaccggagcaacagacatcacgacatccttctccccagggtcacgtgcaacccttttgtcgtgtatgtgtccgttccttaggccggcggaccagcggctccatatgtaacgcggaaaatgcgggcccacataaggccagggatgtcacatgccagtcttgagctcgcggtaagcttctctgccttcctttgtaacgtcctgctcgtatagcttctcgctttgcacacactccatctagagcagactagcgcatgggggatataaggccagtcttcacatgatctctgggggcatgtcccacgatacgacattgcggcgcacagtcagagtcatcaacttgctgcatgaaagtagcgccatcttctagatgccgccccagccttcaacgaagctagtgagcctcgaactggtcggcgagtataaagcgaaaatctatagcgagacctttaagcatccgacttatggcaagttaagctggaatatatcgcatatgaaaattggcacaaatgggaggaaacgctggtatgcggtggcggtcgatgataaccgtaaccaccgccataattatgtggagccagaacgtgcagaaccattgtcacacctcgaactagctcaaatacttatcagcaacggaaacgaaggcctcaaaaataaccctgactggcctacttggttctatgaccaatcctattcgggactgagggattcgattcagaatgcatgtaagtcatatcgccctcttgtcgaagaacaccgctctgcaccgagccgacattcaacgcccgatattgtaagaacattaagatgtagcgatacctatcgactgactcctcacgtcaatgtcagcaggtattggaagtcggtcagcaagattattctcgactgcttgaatattccgaggaagttccggtcagttatacctttggccggatctgtactgggtccgcaggagttgatctctttcacgacctggttgctggctttgttttgcgtcactctcagcccgaaacgttagaagcctccaacaagggcaatggagacgaagccattggtcaggatactcaaacgttgggaacgtatcccacgtattttatggaagacccagagattgcgacagactttttgtttaatgctgtacccaccgattctgagcaaccagaaaattggtcacccgctttggacgaagtcgctccgatggcagggctacaggcacaggacaaaatgttgccctccgagccgactgaggatccagatacatcaatgacagcgtgcggcggcgagaactgtctagccacggggtgactaagactgcccatgtcgtcggccacgtgtgattaacgatagatagctgacttattgcctgatacaccagtccgaggcctgaatggcaggccgagcccctcaaagcttcaatcgccaagcgggattgctacgaagaatggacggagcgcggtgatctcgttactatacgatgggagctccgcttgaagtacgaaaacatgtccttacctcggcgcgtgaaggatgtcgtgtttgcgctcgtacagataatctcagtcctgtcggggcagactcgggttagtaccactatcaaagagctaccggcatcaattttcagaaatttcttcgggaggagccttttcaagtatccgaaatggatcattcgtgaattggaacagttcgatttcgtggaaaaggatcaaatttgtaacatcttgacgggtaacataatggctccagggcaagaacgggggaaccactcgtccttctcacagctctcagtctctcatcctgaatatactggtgagcaaggcgttcgttaccactgagggcgtccagaatacccactgtcgtcgttgcgtccctctatgcaggaaatcctagcacggtttccaattccaatagcgatgatgaggaacctttgatttcaaactcgatcacaccttcttccctgcaggctatggaaagatgcagtgtcttgtccgggaatcgtccggtctctccagattatccaggattcgagttctgccctacggacattctgacacgaaggtgatcttggcaaacatggcgcagaattcgcacattgcagtgccgtcggacgggtcaaaaatcacgtgattcccttcgtttcataaagactgtatagatctttcgcatcaagatcgaattttggatccgtcagtatacctggaaactgtatgatgggacgcagtatttcatgcctttttgacaatttgataatttggatggctccctttactcgttcattgcaagactggatctaacttctcgggcgaacaagaaactgccctgccagtagttgtgacgtcgatatgggtcatcctggtttgcatgacttgtggcccatggacggccacacgcgcaagacatacgactactcgagtatttctcatgtctcatggcgccggcgtgatacgcgatgccttgagcacttcgcgtgatcgacactggctaacgccggcccagacaaaggatcgcttgtcaagaaccagaaagaagcctagccgagaaggcaatatctgtttgaaccgggcataaatgaaaacttcgagtgactgaaacagacttggctcttcggtggcgtccgggtcgtcctacaaaaggcagctagtcagcacatcgcctacagatcgatcacaaacgacgtggtactttctccacgatgcaggaaggtgttgcctctatgattacatcggtcgaccagtacgatcaactaattccagtgctttcggacaacgagtccacaaccctctttgaagagggaaaattcaagaacctgtccgcagagtgagttggtccagtcgtctccctcgcgatcctgacggcatcgtgaagctgacctacacgactgtcggactcctccacgtcgggatctagactgggtcttaagagattgaaacaagcattggaaagtcaaacctacacgggatcaacgagggatggagacgaatataaattgaagtggactatcgaaagggtcacttgcgggccagtgaaaattcgattgcattttcgaggtagtatccgtcttgcccagccgaatgacagcggtatgcaagagttcacaaagtcgctcaagatactcgatctagaggaattcgacaaggtttaccagagcgacgagacgaaatatcccggttggttttgtgagatcatccagaaaggggcattcgacgacaacggggtctatgacacgccgagtcaagctcgcgaccgtaatctcaggcaaggtcttgaaagtccctttcgtgagtcggataattggtccccttacatttcacaaacacgatgaactgcaatgctgaatcatgatatctactgatcatacgatattatagagccgatgttcgcgcaggtaagagatcgcttcaatggtatagatctgctgtggagcttgatctttgctcaacatgtttagtccgtgtgttgtcaaactgaaacctcgcaatctcactgcgatcgtatctcgatacaaggtctgtctgaccctatagctgacagtcctatcttctcagctgtaagctctggctcagacttgcacacgataagtccgatgctagacagggacggttttatcattcctgccataccgatccacgatgctaagactgggtccaatcttacccggagacgtaccatcgcacacggacaaatttcgccgcaacagccaaggaccaatgcccggcgctgctctcaaaccaggagatctaccaccggaccggctacaggtccatcggaacgtcgtcttcacaaatacgaattcaggtctaccaccacctcacagtcgggctcaggcacccatctgaaggctgacatatcatattcgtcagcagatacatccagcttcagtgtcgaagtgcaccatcaagcggagaccccaaacagtgctttgcggtccgatccttcagatgccttgtcttcgtacgctcaaccactatttcgatggtgggaggacgagaacttgaaaagtccgcaagaactgcatccatacgagttcctggctacgagtacgcttgcatcagacggagaggtatttaccgcaactctcgcccagcagtcgaagccacacggcacggaacactccttcgacgcacccaacgatccggagagctttgacggattgccaaacatgtggaattagaacggtgaccgatttgtgttggttcgacccatgaaatcctgcatcgtcccgacaatgtcatcgcatctgctggtgtataagtttccgaccttcgaagatcaatgtagatgtggttccgacagatggtcttgactccacgcttccgtgaccgatttgcagtggctagacgggcaagtgagagaccctgtcgatgcctgtcctgcgcccatctttctactgtgattatgccgtaccaagtatgatttgaggcgaattacggctgcgatgagctccgcgctcagcactccttggagatggaatcgtttgatgtctaagcaccaagaatacatcgacagaggcagtcatctaacgatggcatatgcttggaccatatttgatgaaacgaaaagacgataagaagcccaactacaaccaccgcggtcttgcaaacttcagccaacgggagattgagcaaggtcggctttgacagacggcgtcgcggctatcctgcaagaggtgtacgttccacaccacgacggaggcacatgcgatcgcgagatactcgtcagatttggtcatccgaagctttttgcacagaaacgagcaggatgcatacaatgggtatcgcgtagaatctagggtatccttgatcgaacttcacactaagatggcgatatcgaagggcacgccgaatgccatgcggaagcattagacatctttcacgtccatcgcggcgcagccaccgagccgtcagtcagactagggacttggctccggctagatcccgcatacgatatgtatgtttccatttaatcagccaagctcggaactggacattcgcagtcacactctgtactagtccggccgtctctgtgtcgcgttgacgtggaccggtgcttttggtctttaattccatttcatttcggtatcatattcttcttcgattcaacagttttctgaatccacgaggaacccgcaggagaagtccctctgacagaatccatctagttgactgagagcaggaaagcaacacacgtctatttagctctcgccgctctcgctcgaagcgtatcacgcgcaggcgccatgactcactcttcaagagctcgacctcgaagacgagggtagagctaggagggataacaggggggaatccacgctctgaaagtttcaaaccaaaaacgtcaggatcattggtcggcctctagacgcgagtggtgcacagctgggattgcggggacagtggaacttaccgccgtaagcgtagtcgggagtgcagatgagcttggccttctctcccaagctacgaagcgagaacacaataaagtcagatcacgccgttcgagtcgatcgtgctgatgatggagagccggctcacctcaactgggggacaccctcatcccaacccttgatgactcggccgacaccgataggggtaacaaaggcctgacctcggtccctgcaggtcgagccgaaatagatatgtcaacatgaacgtcagtgagacgtggcgctgaccactaagaggatgcgtgagcttacctgctggagtcgaacttgttgccgttggactgcaaagtgccgacgtctggtgagagatcaagcaggaagccgatcagctcgaggtccgcagcggtacggcgactggctggacgcacagtgcatagaaacggtgtctcccttcttggggaaggtcttgccgtcacctggtgtgcggagaaaaagaaagacggcccgaatcagcgtcgacaatccaggcagttgtccgaaaaaagcgacgagctgaatacgacataccaggcgcgattcgctcgacagtaacacccatgttgatagctgatgtggtaaaagtacgtttggagagagagcagaagataggagcggtcctagaaagcattagatctagagtgaaagcggttgaaacaggtttcaagtggttggatgttgaatcgaacaaggtgaacaagagagattgaggtgtgagttgcggagccacgtcagagtgaatcagcagtttaagcgcgaaaggtcaacccgagtcgcgcttccaattgtcacacgtaacccgaatcgtgagtatctggtagcaatgtcatgtcatgcggctcatcaattcactgtatgtacgggaagccaggtttgatagtctgctcagccagttcgctacgagatccgcactcgaaacactgctcacaacgacggggtcacagcagcagcagtttgagcggcttcaagaacaaaaaagatcaagctcacccgggggttctggtctcgcgtctcatctttcaactttctcttgcgtctttgtccgcgcgacacgtttcatggccaaacacgactcgactcgtcagctcgggtcattcgaccggggatactcgtgatcccaccacctttgacgaagatccaggcgagatggaagatgttcaaaaggtactcagatatcatctggctcttcagattgtcgatcctggtgaccaaattgagcagcaaagtgatcatggtcgacatcgaattgagcagcctggtgatgttcacggtaggccgaaagtgtatatgtactgggtccaggatcgaccaagaattgaatgagcaagtcgttcgaacaatgtcaccaactacaaacatcacgcgagcgcctccagggagctttacttgcgcacttcactcgacctcgaaccgacctcttttaaacgaaacatgttccctcgtcctaccgcatgctcccgctcgaactcgacctcgagcttgaactcgggcctcagccttttcgaccactctcaacgagcccagatgggcgccgatcttatgtatctcttcggatccggctcgagccccacaagcagccctcgctcaggctcttcctggaaacccaaacccgctcgaaaggtccgaacgaggatcatcggcgagtctcatcatgccgagaatgtgcaaaaggacgagggcggcgacaacgacggcatgttcatcacctggcccgagagtcgcccgctcccctgctctcgctccagctcgcccgactcttccggctcggaatcgagctactcgtcgaccctgtcgagttcgacgatctcgctgccggattatcactccccgaacggttcggcacgagagaaaaagatctcttcggcttcgagatccaaggtccaggggatcttccgcccgagcgatcaaagcaggagccaaagcgaacccgtggtcgggcggggtcggagctcatcctccgcctcgtcattcatgagttccgcgacgaccctcgtcgaccggtctgaaaacgagctaaacggctggaaagacggaatccgaatctcggtcgaggtcgagtacactacgcacgtctcgggtcaagccaagtgggagctcgatctggacgttcctcgtcgatcgaccggtggattgaggaggaacggtcccggcggcaagggcgatcgatggaacgggaactgggtttgagagttgggctcgagggtcactttggactgttctggctcggacgttgtatgctctctggaaggtttcgttgtaccgctgtagcttatgccatcgatgcttctcacgcacctcgctcacgtttcctcaccggagaatgacccgaccgatcttttccaagctgatcgctgataaacagcccagtatatccctgcatttgtcgagctcgaaacgatatcatcgcaaggtaatacacatatgaatacactttcggcgcacccaggccgacccgcgctcgtgccgctcgaccaatgggcggtgtcacgaatccgcaacgagatcggcaacatggggggacggcgagtttcttacaatattcagtctcgaatcttttgcctctcaagtctccaacctgatcgaagaatccagccaaggcttcatcttcgggtctgatcgggagtatccgggaattgtggaactccttaagcagaagcgctcgctccagccgaaccggccttggcgtcggcctacaatcgaccacaagcaaaatgatcgatcagtcgatgcagagcgaggtgagatgaactgaacggggactgacctggaccgaggggctggccttggttcgcttggacctgtaatccttgatggcggatcggatggcgtcttctgccaacatggagcaatgcagcttgacgggcggtaggctgcatcgacgacgggaatcaagatatcgtccaaggggtcatatcagtatcctcacatggaacgggcctagccagatcgacggtagctcaccagagttcctttgcgatctcggtattcttgatcaacccagcatcatccaaggacaaccccctgaccctctcggtcatgtaactactactggcgatagcacttccacatccaaaggtcttgaactttacgtcctggatgattccgttgtcgtcgaccttgatttgaagcttcatcacgtctccgcaggcgggagcaccgacgagtccagtaccgacgtcagaatcgttcttgttcatcgtaccgacctgcagggtatcaaagagagcgaatcgttgttagtcggcatgtaagtgtggttgcgatgggaggatgggaacgagatcgatctggtcggatcggcgagtaatggtcattcgaaatgccctctgcccatgcccggatccgacccgatcgacgaggatgacgacgagaactactcacatttctagggttctcgtaatgatcgatgaccttctcatggtatcccctcttggctaccccgaagctggcaggggagacgctcgctctggaggacgaggcgatggaaggtcgagcggcgaggagtgcgattcctcgtcgagcgacggcaggacgcgaggtggatgcggcgacttgggtgatggcggttcggaacattgtggtgaggatgtgtctatttgattgtatgtgcgtgttggcaggaggtaacgatgtcgaccaatcgaagtatgaacaatatgatgatgatcgtgtatatctacgagttgtagctggttctcgccgctattcgagcgtcacggccggccgagggtgaaagtggagtgtgaggcaaagtgggtggaggcacgacaagggggaagggaaagtgaaccgcggatgtgatatcgccccacaataacgctgatgatgagtaatcgaaatgatctgattggacaaggaacggacattgacctattttgttcaaatgtatgatgtccgtcactttgccacctttgatgtccgcttctcctgcggtgtcattggtcggaattcacctttcccgttgacaaccattggctcgacctaggttgccacacacaggaaacactgactgctgctattcacgccatagtcgttgaaagtccaccggtcatcccgatctacgtgttcgcccctttctcttctgctcgtctgaacatagtcctcccgttcttccctcgttcgagctcaggcaaaggacgaccaaaaactcatacaccacgcgcaaagagtgaacaactacgacctgttcgactctttcatacccgtacacgttcacccaggagctatacgacagcactagatcgagatcaagatgttccgagctttgcagaggaccagggctttgaagcagagtcagtacctggatcccgatctcgatttagatcttgcctacgacgttggcttatacatttcgcacccctcttctttcttcttgctcgtatcgtgttcgatctcggacgttgaatcaccatcaccatcgccatgaccgcccactcacgcacccacaaacccatcacgctgctctgctcaaccgttctaccccgcctcgtcccgccgtattctctgtgttcaccccgatcgacctctgtacacgtaccgaccccgaccccgaactctattccgacacataggcaaacgtctgcttcacaccacctcgccacgaagggccgatgtcacgctcacgatcgatggcaaggagatcacggtccctcaggggacggctttgattcaggcttgtgtgagtgtttggacgtggtcattctcgatccgacgagatgggatgggctgggatggcttgatgtagtgacaggaagagagggctgaccttgatgattgtcttcttcctcgtccttttgctatctctcggatgctcgacctgctacatcatcaatcgactgttctgaacgcacatcgatggctgtttcaacaaaacgatcggacatcgtcaatctgggtcttttctcaaaacccgtcaactaccgacgtctcacctcacatcccgacattccactggatctcgtgcgatcgattcggcttcatcatcttaggaacaagctggagctcagatccctcgtttctgttaccacgaccgactcgccattgccggtaactgtcgaatgtgtctcgtagaggtcagtccggttcggcctttttataccgagtgaagacgctctcgctgatccctagcttgttcatcatcaacgtttatatcccgatcctcttccgcacctggaaacatcgccatcccgcccacggacacccataacattctcacgactgcgtgtgcggactctaggtcgagcgatcccccaagcccgtcgcttcgtgtgccatgcccgccatgcccggcagcaaggtgtttacgaatacccccttggttcacaaggctaggtgagtccgaagcaccgtgttagtagggagatgtatggtggaacaacagctaacgcctttcgtcccgtctggttgctcatctcgccttcttccctcgcccgcctgctctttctcgcccttcaatcgccacctgccagggagggagtcatggagttcttgctcgccaatcaccctctcgattgccccatttgcgaccagggtggagagtgtgacctccaggaccagtcgatgcgatatggatccgatcgaactcgattccacgagattaccggcaagcgtgccgtcgagaacaaggacctcggcccgatcgtcaagaccaacatgacccgatgcattcagtgtacccgatgcgtacgattcgccaacgaggtcgccggagttgacgatctcggtacgaccggacgaggcaacgatatgcagatcggcatgtacgtcgaaaagacgctcgattcggaaatgtcgggcaacatcatcgacctctgccccgtcggtgccttgacgagcaagccttacgccttccaatctcgtccctgggagttgaagaagaccgagtcgattgacgtcatggacgctatcggttccaacatcaggatcgactcgaggcaggtccaggtcatgcggatccaacccaagatcaacgacgacgtcaacgaagagtggttgaatgacaagtcccgatacgcctatgacggactcaagtaccagaggttgacgacccctttgatcagggagggtgaccgattcgtccccgcttcgtgggaggacgccatgagcagggtctcgcaaggtctggccgagacgggtgccaagggtgacgagatcaaggctatcgctggagaactcgccgataccgaatcgatggtcgccctcaaggatttgatgaacaggatgggcagcgaaaacttgaccgtcgaccagaagcgtggagacgagcctatcgccaccggggtcgacgttcgatccaactacctgttcaacacccagatcgctcgcgccgaagaggccgacgcgctcttgttgatcggaaccaaccctcgacacgaagccgccatcctcaacacccgatttaggaagagctacctgcacaagggtctcgaagtcggtcttatcggcgaagactttgaatcgaccatggagtacgaaaaggtcggaacctcggccaaggacgtcgctagcttcttgtccaaagcgggcgagagcgtctttgccaaggcgtttgccggtgccaagaagcccttgatcatcgtcggaagcgccgtcatcgagagcaaggatggagaggccgtcttgaaggccgtggccgagtacgtcggcaagaactcggacaggttcgtcacccccgagtggaacggatactcggtcttgcagagggtgagtgctcgtcatggatgatgaaaatcgtgaaccctgttgctaatctaccttgttcgcgcttgcaggccgcatcgcgatccgccgcctacgacatcggtttcacccccaccgcctcttcgtccaaggtcacccccaaattcgtctacctcttgaacgccgacgagttcgaccccaagtcgatccccgaaaacgcctttgtcgtctaccagggacaccacggtgatgtcggtgcccagtacgccgacgtttgtctgcccggatgtgcttacactgaaaagtcggtcacctgggtcaacaccgagggaagaagccaaatgggtcgaaccgccgtgcctcctcccggtgccgctcgagaggactggaaggtcctgcgagcgctttccgaagttctcggaaatcccctgccatacgacgacgtcctccacctccgagatcgcatgtgggacatttcgcctactctggttcgatacgacaacgtcgagaccccctcggtcgaggttcaaaagcttggattgaaggcgttggcaggcgtccaggcgtccgcatctggcgaggctttcaagaagcccgtacaaaacttctaccagaccaatcccattgcaagggcttcggtgacaatggctgcgtgcaccaaggcctttgtgacgaaagattacaagattcaggacgaggacagcggtaacagccaggtgagtctggaagaatcagatcaatactgcaaggtgtcgccacagcgactgatcgagtcccttccatttcaggctgcgttcgcatagagacgctcatgaacgacttcgagtttttcgccccgacctttcttgcttatcccccgcaacgcacggtcgtggtccgctcgtgtatcaccaccacctcttcgctcatctcttgttgaggggactgtttatgagtctcctgtactagtactcttagcgtgtggcatcccaaatatggcattatcaatgcagaacgatcacatcgtatgctcttccgaggattcagggtaaacgccgctaccgttatacttccgtctccgagagtcaggtatggctttggtgtcacatcggcaatcggaatctcgtaccactcattggcgagtcgcagaacagggcaagggggaaggaacatcggtacggtcttgtcacagagatcgcggcgagcaaacgtcgtgaatgatcgcggtcgactactggcttcgtgtcaggcctcaaccttatggtcatgaagggccaaccaagagagagatcgcctcgtcccccgaccccctctcccatttccccttgtcaatgagcgtcaatgacataatcgagcggacgcgtactcagtatagtatcgatatcactcgacgagccggacaatgggagcttccgataacaaagtaggtttcgctgttgatatcgttcccaaaggggttcgacaccggagctggcagatcgaagcctaaaaaataaatgatatctcaatcggattccatacggaagatacaactcgaaatccgactggaacggaaggggacgggccagagtgctgaagccaagcatcaatcaagagccgatgtattcggtcatcgggacattcttcttggcgagcagaggtccaagcccggccttgacgctgtggagcagcacggattgtcccttttctcttgcggtccggtaaaacatgatcctcgccgttacttcgccgaaagccacaacaacggcgatgactgccacggtagtacaaagcttctgtcagtgactgtacgaggttatcggcatcccgacgttaatactgactgattagaatgatgatgatccaggtaatacgattcatttgcccctggtcgatatattcgtggatgatttccaagaggtctccagacacggcgagacggtcattcaaaacctgcactcggggtccgatctccaagtaatcccggatggcttcataaagaggcaatagcgaggcctctgaccagaaaagatccggcgtgtctgcgagattcgtaccctgtccatcagctcgtttccgctcagcgaatcaattttgcaccaactgacctaggatcccgctactcaaattgacgtccatcctcaaagtgaacaatcgaccagtcattttcaacgcctccttccgtgccagagagagttccccagtctcggccagctctttggggaatgaggcagtcgatgccaacgagtcctgcataacgctctcatatacactcagttttgtcgactgcgctattgcgtgcgagaccgagagctgtacacatggctgtataagcaatcactagcgatattgagaatcacaacactgaccttgagcagatgcgagtgcgacttgaaagctgcgatggtccggaaagattgagcctcgtgcaagcacaatccacatcacagaagtcacatactgaacatgtcgttgtaaatccgaggatagtccgcatcggggtcgtaaacctgtgggtgtatcgattagtaacgggtctggctcaatttttatcatcaacgcgagttactcacatgatgacattcctcgacctcccagtcatcttctctgagcggcctcgaccagactcccgcgctctcgcaatcctccaggatgtccctctcttcccgttcggtcaagccgaagaatacggtcaccccatagtcgaagaacacaacctcgccgaccttgatggaggacgatgatttccgccttcgttgacgttgatactgatttctatatccgcggacctgtcgatcgtggtcctcgttggctcggagagcggcttccctagagacacgtagatgttcctgagcggagaggtcggcgtcgtctgcgatgagaagaccttgcaaagggctgtcatcaatgaccggcgtgtcgagcggagacgattcgccagtccctggctccttctcctcgtgtaccgtaggcagagggttcagaccatcaaaagtggcattctccggtgatcgagcagtatcgtccccgttctgcgcgtttgggctggtggacaggaggtactcattcgagtgggtatgatcttgagtgcctccgtcctcgggtgcctgttgcgggaagaatccatcatggtaaccgacctcctccgcctcggtcattcgttcgagtagggagacacccccaggagacttcacggcagggctggatctgaccttggtccccgcaccgtaccccggcaagagcggtagcgtgtagacctgccataccacaacaaccagaccgtgttagtccgggatttcaagagaccccgcctcggcatgcctactcactgcgtagactgcatcgtcaaaaacccggacgactccgaccccgtgttcccgcttcaagaacgcctgcaaaagtttgatccgataactctccgccgtcgcgtacgccgtcagcctaggtagcccagcttcctgcctctgactcttgctcattttctccgcgtcagtcctctcgtgctcgtcatatgcgggagggccatcggagttggaatccgaggtcgacctgacccggcctggaggtggagctgatggggcgatagacgggtccagaggtctggtctgaatctcttccgggagcaatacgtgcttctgggtcaatttggaggttcggacggggaaagactgcttgggttgaggtttcgacggggtgcctcgaccgagtggggaaggtatccgaggcgcggtagaggctcggaggtgagctgggatggaaaggagggcggattgctggggggctggaacgtgctgacggagagcagaggcggctcgggcgagacctgtaggaagggtcagacgtgtttagtatgatgtcgtactatcagactaaacggttgcacttgcctggtaatggtccggcagatcgtcgaggaggttgcccagcagtcccactcgggttgctaggttgacgggtggacgtgcccagcccggttgacgtcctggaaggaccggcagcgggtcgagacattgtgaggtatacgtgtacgtagcactaggtctatgttcgcctatggaggctgtcgtgttgtctataggtcggtaacggccaggataaaccgaaacagctgcatcgagatcaaaggttcatcgctcgagcttctccacatgcagacctgctgctcaccgagttttggcttccgtcgtcgccgctcacgtaatatgtgacgtaacgtgagccgtggcttgttttctcaagcctcaggaatgcccgctcatgggaatggatcgatttgtgacgatttcgaggcgattgtgtaggtctagaatgactggacgaagtgatttgccctgggaactgtcatccagagtgcattccatcgactttgcgggtttaaatcgaaagtttgtgatccaaaggtatcccctgaatttgcgatttccgtgatgagatctcgttctgatcaagcgagaattccgcagtcgtgccgcgcgaaggaagcaccgggagggctgcaaggggataccgcgactcgtgatcaggtcggcaggtggacagcgacggcggacaacaacaaatttggaacgaccaccgaatgatcgaggaaagggtgattgccgagattcgaacgtgataagacgatagatcctgctttcgacaaggacggtttgatggttttccggcaagtggtaggatagaatggatgttacgaggagccaagcgaggtttcggttgagatccgagacagatggaaacgctgcgaatccgaaaggtagaacatcgaatgagaacaggtagcatgccaatagaattgcactcgcctcgttgtgagcttgttcagccgccaagaagcctgcctgttttagccaaattgcgacggcaatgatgcggatgcgtgttcgcttcgatcgcgggtcgaccacctggagaattattcgcagtctccgcgtctataggcggatattgctctccaactccttaggtttatgtcactctcaaggtcgttacgagaaagaaaatggctgtgcgtgtatgctgagttcgtccgcgatcagttgactaaaggaatatcgcaatggagttagtgaggagcgggtagtcacatggccgaagtctcacaagctacgaggtcctgtcgaccccaactcgtagaaaatgatcctgcgtggatgtgtgtaaacgtggaacctcgatattcttcatggcacaactcttactgggacaatatttcttgacttttctgcgacgtctggtgactaccgactgtagatcctcgatgaatatgttcttcctgttcttcggcatggtcctcctgcgggaccggctcgtgacccagagcgacccggcaaaagacgcggtctccgtgacgatcgttctttgtcctgatacgatcctttccgacggtatcggttgggtaaaggggacagacaactcaaagtggaagattctatgggtcgatacgtaagaaatgcagggcgatcaacgattcgaatgatcggctttgtttctcaccgggcaccgggatcctttacgcttctcaggtcgtacgtatacatatcgaagaccttttcgacgagcgagatgtgaacatattgaccgctgacagtttgtcaaaaatcaaacagagacttacggataattgatgactagctttggaatctgagataaaaaatgatgggaatcaagatgcgaacggcgcgagctcttggatgggggagacgcggaattttgggggtcaaatcggtcagttcgtcctctctccctcgccctctccctcaccctctccctcgccatccattcctcactttggacagcagcactgcagggatataagatcacttgcacatcatcgcttcgatcactttacctcactctcacttcgacaccacctcactctcacttcgacacttcccctcacttcgatctcaccaaaatgccaaggtctcgccaaattccgccagagcgaaacaacgtcggcctgacctttccgggttccgactcgaccacgaacaccgcttcgaccatgtccatttcatccttgaaccctctcgcctcgggctcgaactctgatcggacctcgacccacccgaaccctgctgggatttcgccctcgactggcaacgtcccgaacgaggaggctcccacggtctcggacgtggactaccgtcgagtcaaaggggatcttggagacctcagcgacgcagtccccacgcgaatcgaccgacatgcgaagcgaattgacaggaacactcaagaaattgacaggaacactcaagctatcgaagaactgcagcggtcttacggccaacagcagcaaacaaatcaagctttgatcgcatttcaacaacgaaatcatcagaacttgatggttttgatgcgagatcttgcaggtccggcttctcgagtgctagctatcgactactcgaacatcgacccgcaacttgagtcgcaccaagagcgcggtccggcctctccgggacaccaagggcgagaaggtaagtgccagccagctctgtatcttgatttcgctaagccaaattcgaacagaccacgcccacggaagtggtagccactactgagtccatcacttgttgtcgtctttagcgacttttgcggtcgtcagcaattttcacgcctctcatgtaccgaaactcattgtgatgatgatttgatcaaaagattcggggttgcaaacgaattggatatgaatacaattgaaagcgatatacgagtacttttctccgcacattttgccgggccgacttatcggaatgaatgggaggagggaatacgcaaaaaaaccagaacgggatgtggaaaggggagaagaaaacgatcgggtaggaggggatacgcaagagaacagaacgggatgtgaaacggaaagaagaaaacgatcggaaagaagagagagaaagagacaattacctcgatggttctcgtcctccgcggcggctacgtggtgatccgcaatcaagtaaggtagaggggacatgtcgaaattgacttctggtacttagaaacgatgcaatggagtgtgttttgtcggattgtacatgatttatcgccctgcctacaccacgtcttgacgttaaaatcagcaatgaagcgaggctgtgaccatctcagaagaacgtaagttaagcccgagcaacatcgatcaaagcttgttagctgacgaggggattgacgcgggtttgttccgaacctggggacctcaggtggggccgccgggggtgtcttccggaccacttgttgggtcgctgcccctcatatgtcaatgagcgcttgaatcctcaattccgatgctcagacgaatgtcatgctcacacagcacaggagtgaatcgatttaatcgtctcgagaatgtcgagatcaagatatgagatgctctgagacgatgcaatcggctggtaatctcgctcgatagccgttgtgtggttcagtcaagggaaatcgagccactgaggaggaaacctcacgcacctggaactttatactgcttaagtaatccggaccgtatgcttcggcgattgttccggtatccaaacatacttggcaacaaggcctagcgtatcgcgacagtgtttcgtgagtgtggtccaaccgccaacaaaatccctcattttgatacggagctgtgtgtcgggaactcgtcgttcgagagcaagaagacgaatatggcattcaagttgtttatatcgctgggtatcaacttgttggatgccgatttgaggttcgttctcagatgtaccctaagatccggaccgtccgggtaatatcccattcgattgacttcaaggccttgtgcttctgtgatgtccggcttcatcgttcgcggtaccaagcagaggaccaggtattgcgggtagggtattaagcttcactcgctcacgatatggcattgagatttggccatagcgggggtttctcctgtgcagacgtctgcgatactgagaatttcgaaatgtcaaatcgcatccatctcgtcaacgttacttttggctctgacgatttgtctcgctccttgcaccgtctcgcggcattctcgctagctaccaggaagataagacgggaagagtcgacccgatacctcttcatgatgtggtctctgaagccgtcttcgactggctcatccttttccaagatcttcagggtctgtagcatcgcggagaaatgtccttttcacttgtgcggttgcagccctcctctacgcaagggtgatcgtacacatcagtgatggccgaaggacgaccggatgtggttacagcataattgactggacggttatctcggactcgtcctccgagatcgggtcatttgcacgctctaatccgcagctcctcatgtttgcttgaccggtatgtatgttcctgaatgactcctcgctcgaacctttgcaagagcgatcatacgatcagctttgccctgtgtgtcgcaggacatcggtagattcacgaagtctcgctttcccagtcggactgattatcctcatcgctactgctggttgaacaggagacatgtcggttcgaagggtttggaaatgtcgagtgaggtgacaacatccctgccgggcggcaaagcggaacctccagcttttgtgcgagcacggcgccgaggttgttggaaaccaacccgttggccgatggtgtatagtcatatagctgccgttctattaccttaggtttgtcacggtgacccgtttactatgaccggtagctcagtagatcactatatcgcttgagacatcatcagactcatttgacgggtggtttcggcgtatcacgtgacatacatttcggctgaggcaaaccttcgggaccctatagttgctgctgcaccacatcgtcgtgacaaggaatcattcaaatagagcgtaatgtacggcatgctacgaacgttgtcggtcatgatacattcttccctccccactggccgtccggcgtcctcgctcattcctcaatccattcgcgtttctatcaaggttcccccctcatttcctatagccttcatcgtgtcgtcggatgtattcacggcggacaggacgccggtcagcccgacaccgacatgtccccacggcacagatgcggagcgagcaaaaggtcttgtcccaccctgcctttgggttaccgggagccgatctttgccacttcggctgattccgctactgggcggacactcgttgccgagcccgtatccagcgacgggaaagtggaccaggtccgatcggcttggcgagctgcgttttacttcgttccataccggtctatcaaccatatggaagccggcgtagcagcgactacctagggagaccgtaaggcaagttcaaggtagcccacagtggcgaggcgtccgggagctatcgttgtccattgaaggatacaatctgcgatgatatgacagaacggacggacgggtcgttgcgcatgtcagctactactactagctcctgcatactgtcgtgcgggaagatactcagatactcacgtaaaaggagggatcccaagattataattgagagatcgatagaccatgcacaaaggcagtagttgcagaacgaatcaattcgtgttctccattcgactggaaagcgaagacttagagcccacgttctaggccgagaccctccattcagtgaaagccggtgagcttgtttctatctaggcgaagaggacaaggtcagcttaaattgatgatcgagctggttaccgtcatgatggtgtgtcagggccgtgaacgaggatagaaaggcatgtgtaagcgcgtgagcacgcgttcacgggctggggaccgatatgaggaagcggtaatgagacggaagagataggagggggaatgggaagatatcggatgaggtatataagaatcgaaggaaagaagagacgatgaaggaaggaagagacaaggagaaaagagatgcggtgaagcgtgaaagtagtgtgcagctgtgatagtgaagtgttaaagagacgaggcgacgagaagaggaagattatatgtatagcgtgccgtgcccttgcaagagagagacgatgcgaaaaagtttcctcctggcaagcgggctttgcgcttttgtctcgcatctgtctccattgggcataaagtagtagtatagtagagttcaggtgatgtgatcaactatatattggatcaaagcatgatctacgaactgatgtagcacgtagcaataggttccgcgtcgagtcgggaccggtcggcgtgacagtagggcgatccatcaaaggcacagcccgtcatcaataatgaaacgcggatcctcgcgcgttacgcgaaagaacaaacagatgggcggcggcgcacggggaggagccatcatcaaaattcatcgaggtcatcaaaatgatcaaactgggcttttcaaaatcatcataaatcatgccgaaaacgtccatcgatgacgtcgatggggaattttctgcccatcaatgacgtcgagtgatttgcttgcggtggattttttgatatcatcagcttggcgtgcgatggccacttcatcggcggtatgcggtggagacttaccaaaaggcccatgagctcgcgcaattctcgttctgctgctcctgttgctgttgttgctgttgctgttgttgctgctgcagtcgttgttgctgccacatcggggatcagatgtcgactgtagcgcaaggaaacatagcactcacgacgagcaggaagagtcgaacaacgagatcgcttgagcgttggtgcctgctggtgctgctgctgaggttgttgctgctgctgctgttacttttgctcttgctcctgctgtgcgtagcttcgattcagtatctgatggagtgcatagcccgttgaccaacacgtacaatcgagaggacgagttgagctagctcagcatcctgagctcgacgtcggtcttcctcatgcctggccaaagcattcagaatcaaaatgcagccttgcaccatacgctgagtaggtccttctcctgccatcttgaacaagtcgatggtgttgatctgctgtaatgactgataagacgtgtatcagtagtatatcagagtgataggtacatcaatcaaacgctcgcagaggtgctcgttgcgaagggcagcacagacggcggaagcaagttcggaaccttcgcgacgcgtcttcagtgtgatcatgagtccgcccagcaacttttggcggtcctcgattcaaatgtatcactgccatctgggacatatacgtggactacaataacaagccgtttatggaacgtatcaagccgaatcgcccctaaaccttgcaacggaagccagttgcggacatgccgatttggctgatgccgtcgactcgacaaaggcttccatcgaactcccgcaggtattttgcgcctgagtagggtgacttgaccaggtcggtgcccttcatgataggtgtgaagctggcagcacagatgtcgaagtcgctgaagtgatcgtacgagatctcgacggcgttccgagggttgcgatcacctgcagtgatgaccgatcgagcctgcgagtccaagtgcggtcagtagcgatccttaccaacgctcgagcttggcccgactcacctgcgtaacgaccttggagtcggcaggcttcatgtcaaccaatcgcctggcaaacacggccgccgtcgagttgttgcccgccttggtgaatacacgcatggccgatcggagtgcgagttgaacatgagctggctgcagcttgcagtgcgtgaagaaggcggcgaggtcgaggttcctgctcaaggcttccggctcctcggcgacgaggcgttgacgctcggtctccagcatgagaccgatcacgtattctcgagccagatcaagcaagtccgacacctgtcgcacatactgaatcagccttgcatccggcagggactcgcagtaaactccaactcacctcgccagcttcgacgtcggactggacaaccaacagaaccaactttcggaagaccccgcggaaggcctgcagcgattcgatgaacttccctctggtgaagagcttcagcccgtccataaattcgccttcctttatcgcttccagggtataagaggtgaaaggcaacgcctcgctctgttcgactgtatccgggttgcgtcgaatgttaaactggaggggcgagagcgacgggttggcggcgacgtggatgtgcgatgactggaaggctgctaggaagtagggcttgagcggttcgaagttcacggctccaatttgacggttaagtagctggatcaagcatatatcggtgtcggtcagcattcaggatcatagggtgcctagtcacgtccgtatgggaagatgcgtacctgcattgccgactcgaacgatcctgcagcagcatggtcaatggcaaggggggaatttcgcgtccagtgctcatcttcgccaacgccaggtgacacgtccgatgtaaggtcaacttgctcatccacgggaacattgccttgaggctcgtcctcaagcacagcgacgtcttcatcgagtccccagccatcgtcttcgcctgcatcatcatcttcgtcaccagacatcgcttcatccgccgagagccaggtctgttccgcatctggatcctcggtgtagccgttggcataagttgcctcgccgtcaaccgcgccggccgcaagggctttgtcgaaatagctctcgcccagcgacttggtaggccaggtcttgtcaacttgtccagtgacaacaggtgatggtcgaagggtgctagggccggcagtagggacggtgggcacatcctcatctgtcataccagcctcaacaagaatctcttcagccagctcatccagaccatttgacttggcagtgtggtaagccaacgcatctaaggtgcagcaggtcggatgagccacatgacttgataacgctgttcgccgttactcacgcattccagtctccttcaagactgtgattctgctctcgacgtccccgagatagagcgagttttggaagcgcgacatttggtcacctcgcttgatggagatcccgtgcatcatgcccaatttcttctcgttacctgtgaccaggtagaggaacgaaagcttgtcgaaatttttcgtcttttggtaggccagttcaacaatctgaagatatcgcttcctgtgagctttgcttctccgaggatgacagaggggcaggtggcacataccgggtgattaccctgcttgagagcctgctctccgagacgcttccacacatcaggtttgtcgagttccttggccatatcaagcgcgacggtcaggttaccgcattcgatagccagatcgaagcgggtggtgggatcttgcacgaagtgaagggcgatttccgggtaccccttcttctgcaaatacgcaatgatgctctgcccgaccaagttggagtttcggatgatttgcagaacctcatcgtagttcttcttgaccagggcgagcttgaaacggtactcagtcgggtcgatctgaatggttcgtggtcgcgcggtacggtccaagcagtagacggtggatcccttgacccgagtgaggtagacgggctgctccagcgtcttgatgataccgttgtccctggaggaatgagacgcaaaagacttagcattattgaccaatgggctgcaaatcggctgcgtgcgactcacccctggaagagggcatatttgatgtgattgagggtggtgtagaccagaacaccgctgtcatcccaggcagccgatttgatgcggatcgtctcgtggatgagtgaactctgcgtcaacgacttgttggcaatggtgatagctgacatttcgcggaagtcagtggttgtttgccatgtgcagacgagtcactggaaggactcactatgcttgctcaacaaggcaacgctgtttccgtcaacgctccaaacaacatacttgacgggaggggtcgccaattcggccaacgccttttgctgttgaatatcaaacaggacgaccgaagtaggggtcgagagcaggagagaggcagtccctccatagaagatctcgttggtctgcgtaggcaacttgatggtcttggtcaacgagttgttgagatcccggatctcaaccgactgcgagggaggagtagaacggaaccagatcagtcgacatcatcagctattatgaccacaacaaagctcacctgagcggtcttgtcaagaacagccaaacggtttcgcgcaacaaagatggcagacgacccttgtccacgcttcccttccacagccgaatcgcgcacttcgcttgaggcctctcggggcagagcaacaagctcgtaaattccgttatccgaggtctgggtgacggatacagtcgaagtcagcaagtacacggtagtgcgccggactagcgggctactcacgctcgtgacaataacagccttttcagcaggattgtagctgagtgctcggggctgaacgtattgcgagccaaacttcctgacgctcatcacgttggtgtcggttccggcgaccaagtcacgcatgcggatgctcttgtcgcgaacgtagaacaggctattgcccgacaaggcaaaggcgggacgttctcgctcgagtttgaagacaatgagaccgttgtcgtgaccggcagcgaacaggttgagcgtaggatgagcggtgaggacccagaatcggtcatgctcccttcggaaggtctgaacggcggtcctcttggtcatgtcccaaacacgaatcgtcttgtcctctccgtcggacaagatcagctcgtgtcgagggtggaagatacaggccgagacgttgttgaagtgtcctcggcaggtgtcgacttcccaggctttggtgtcggacatcctccatagcttgatctggcgatcgtcaccgcacgagacgatcaggggcaaggtcgggtggaaagaagcccagttgataccacggtcgtgctgcgaggtccagaaacgatgtgagctaggatttacttgccgttcggctggatcgatcgatactcacgccttccaacacgtatttgacctggacacggcagtggactgattcagcttacatcttttcagcaccgaagcagactcgcaactcacgacagcatcggtgtttccgaacaagtccgcctgaccctggttggctcgggacagctgctcctccatgctcatcggagcttggtgagcctgatgcttcttcttcaagccggtaatgtcccagactcggacagtcaggtccatcgacgctgagacgatcagatcctccgtaggatggaattgagcggacctgtcgaagcgagtcgtgatcagcaccgcattgcacactttggcgagttcactttcgctcacatgatataatggttgtgaccgctgtttccaccaagttgtcagcatgctacgaaggtgaccttccttgttcggatttcgcttacgtcaagatggcgatacacgtcctcgactgccagttccagatcctgatagtctggtcatcggaagcggacaagatccaagggtactctcggtgaaaataggtcgtcctgacatagtcgagatctacagtatgacagcagcattgaggtgagttctactctgatgcagcgtagactggccgaatgcgggactcacggccggtcaaggtgaacaagcactttcgctgcttgtagttccagaccttgatcttgtagtcgtcacctccggagacgaagatgggctgagtcgggtggaaagagataccacggacgggtcctacagcaccgatagacgaagcggagtcagccatctgggagaatcgtgagggggctgggaagcaaggtcaagactcaccatcgtgctcatcgtaacggtcaaccaacgtgcccatctggtagttccaaagttgaatggttccattgtgcaaggtcgcagcgagaagaggctgcttgggatctgcggaaggagagcgacaaggcggtcaacagggagcagctggattaggggtatccggacgacaagctgggaacgtacggaatgcaattcccttaacccgagggctcttcgactcgaactagtccatgacattcaggatcagtcatccgtgcgctttcgacattttagcgaccgaattaaaagctactgaccttggtgagcatctgcatcttggcagctacgtcctccctgttctacttgtgttgagtatcactggtctcgtccacgtttgtttcgtacgcgtcctttgatgtacggaagactcgatgtctacgaaatcgtctttttgggccacaccttgagctcgattgtcgattagaatctattcgtcaaaccacccggagaaagatcgcttggtctgatgcgagtcgaggctctgtagggatgcgatctgcatctcggaaccaccactatcgtgcagcaacggatcaacgaggtcgtgagcgacgtgtgatgttggtcaagctgacacgtttaacgcgtctcgatggtagtcatagattatagctaatgtcaggcttattctcccggtagaccatgaccgggtcaactttgatgactatgacccgatcgatcgacctgttcaaacatgttcgaggcgacaagaacgcttattgatcattgatctactgtatctatcacataaatcatcttcgccatgttcgctcgatcaggactccgcactcttgtaggtcgaccggtggtactggccgtcgatcggtaaagctatgttgaccttcccgcctctgccaatcaaatagcgttcattacccgctcgtcaggttcaggcctctgtcaacgtcttggcccagcgaagggccttgtcggatcaggctaggaagttgatcgacgatgtaagccttcacactattgccaatcggacgcttcggtcgtcgagcgtatgactgacaccatcttcttgtctcccacgtattgacaggctgtcacccagaaccccctcgtcgtcttcatgaagggaactcccgacgctcctcagtgtggtttctctcgagcagtctgccagattcttgatgtccaggtacgtcgaattcgctccttcgatctcgttccgccaccgattgcttaccaaacatcaccgtctttcctcctcagggtgtcgccccggagaagatcaagagcttcaactgtcttgctgaccaggagttgcgagagggaatcaaggagtacagcgaatggcccaccatcccccaggtctacgtcaagggagagtttgttggtggatgtgatatcatcctgagcagtacgtccatgtcatccttctgcttccctctgaatcgccggggccgttccgctgatcactcttttctgatgatccagtgcaccaatcgggagagcttgagaagctgttgatgaaggaaggtctggtatccgagttcctccccgaggacgcccccgagcccaagaaggcctaggctgtcatcggagtgtaccacaaaaaacagagtcaaatcacgatcatgagcatgagcatgcattcttctggacaggtccctggttgggggggtgcaggagatgtcgagtcggttctttggattggaacgggctgcgcgcagcaaggtttcacctcgacttcgccgtcagtaacgattcttcaggtctacctcgattcgtcaatcgattctcggttatcctattcgatggaagtgaaatggaaggaattttgaaccgagtcggctgggctatcatgttcagggcccttgaacattggcatgcctttctacgaaagtaagggcgatacacgctaaaagaatttccttgtttcattgcgaaggcgtagtcaatgcgacccagcctcatcgacagatagtacaatcgaaaagcctgacattcacactcgagacccatggcatgcagactcggtggaccgtgatgatcagacgaaatagtcgacgaaagccagtagcaatgctgtgcttgcaaaccgcgatgtgctcaacccataaagcttgtccaaccagctagacaatcgagacaatgccgattcgatcggtattcaatgggttgattgctggattcgcgagatacaaaagtggagcaggtgataatacagtcatatagtctccgtgttagacagccaatcttcgctcagatcttggcagctacccggatcgcagctcgacatcccgctccgacgaccgcgctcaagagagcatgaccaggtgtcagttgagcttcattctcgactgcgacatcgagatgctcgagctcgtcgtccctgaattcttgtagtacctcgtggagcagtggtagtgacggatgaacctcggaggtcggcaaggcggtagtggtgaatgaagaaggtaagccggaagacgtgtgatcgggggtaacgcttgcggttgacgatgcagtgtgcgtttgcggtggagtgggattcgatgatgaaggcggaagaactgctgacagagccttgatttgactgcacaaggtgggacgaagcaataaacaatcgaaacaacgcatttagttgaggtgggtcacgtaacgtctctcgaaaacgctttatctcactcgtcgtagtgctccccgatgacagtctctacggcctctgtacacgccatgatcgcccgcttgcccatcaaagccgtgccggcaccgagacccatcgccattgccttccagacaggatagaggatagtcggtcggacccgatgttgcttctgtaggcgcaagagcgtggcgaggtgatgacgctcagtcgcccacatctcctacagaatcagcagaacgaaatcaataaaagcgtgcatcatcggatatcggcgggttacggagcgagccactcacctcaacctgctgggcggtcttcttgtctcccttgacttcggacacaaactttgtcgcctgatagatccaatttgcggcagcttctccgatatggtccaccctgatcgtctcttccaatagccttcgctgctcaggagccaagtttgtcggtgtcgaggtagtcgcctcgatcggtctttgttgaatgaccggcggtttggatggtccgccctgcgctggcgtgggcactccgtatatgtatgaggcgggcgtcgccgaattactcgaggaatacctctgcgaagatactctggagattgccggtgcgattcgaaggctcggccgtgtggtcctagtcgccaacgctgcgatagactggataggtgatgatacgtgcttcatgactctgcgatttcggtgtcatggagtcagctcatgatcaccacaatcgccacgacacgcggctgcggaaagtattcgacgcagacttacaatcgaggattacttcacaagatacagtggtttgttgttcaggttctatctgcttgatactcgacagtgtcgatctttgaatttgaattgaaaagtctcgatcgatcacaccgagagacatgctaacctcggagtcattgccgccttgcccgatcaagtgaatcacgtgatattcaactcgacgagatcatcttccttcatccgcctcgcgagacatttctgaactttcagacttcgactcacctaccaactgttaagtgtctatcatcagccgtatagctgtaataaccctaccgcatccagtccaggaacagcatctgcaatcatgtctatgctcaggaccatgtaagtcgaaggcactcgtctgattgccgcagcgagctcacatttggctgttcacatcgttcgcttccagtaaaccgaagaacgctcgtgccaaacgagcactcgctgctcgtgaacctcagctcgtggagaacgagaagaccgccatctttgttcgaggagagaaagtcagcgagagcgtccgggatgcgatgaaggacctcgtgagtcacgcttaagcagtcaacgaaagctcttttagctgacaccatccttccgctatcagcacgccctcaagcttccccactctatcaacttcaacaagaagaaccctatccaccctttcgatgccgacccatcccacggtgtcaactctctagagttcttcagcgggaagaacgacgcctcgctcttcgtagtaggatcgcacagcaagaagcgacctaacgggttgacctttgtgcgaacgtttgacggacgggtcttagacatgatcgagctcggaatcgataagatggtcgctatgaaggacatcaaggtgagttggttgtcggcgtggagatgtcagacgcaagctgatattgtgctctatggtgcagtctcccaaatccacccctggccaccgcatcctgatgtccttccagtcgtctctattcaacactcacccgactttccaactcctcaaatcgatgctcctcgacttttataacggccacgagctcacggagattcccctccagggtttggagaccgtcatgaccgtgacggcgggacctatggacggcgaccagaccggagctagttcggctgccatggctatggagggaacgggctcgagcggcgagagcaaggaaaagctacctgcggtgcacatccgggtctacaccgtcaagatgttggcatccggtaccaaggtaccaaagatctcgttgaccgagatgggaccccgcatggacctgtccacgaggaggacccagcttcccgacccggagatgtggaaagaggccatcaagcgacccaagatggacaagaagacgatcacgagcggacaaggaaagaagaggaagaacatcgagacggacgagatgggtgacttggtcggacgtatccacgtggccaagcaggatctcaactcgatgaagggcaagcgtctcaagtcgctcagagaccctgccaccgaacgatcggccaagaagcagaaggccagtgtcgccgaggacattaccatggactaggtctgatttcggactgtagatcccggtccacggttgcttttcgcggtcgcaaagccatcatcacgtcactttcttcgttcgggttactttgtacatggtctctccgatgttgtcattccatatccactagatctttcattattcttcgtacaggctctgttgaatgaggcgtgatcatccgtgaccataggttgacccatggtggaccaaagctgcgacggtcgaagagtctctgctctaccttgctcgcgtcacgctcgaatccgcaaactgacgacgatgtccgagaccccgaaggcacaaacatacgttggtgatcggctactctttagctctctgtcagccctgcatcacgataggatcctcatcgatccggctctcagggtctgtttggaattggacgcttcccttgtggtgagtgtggctcgtgacgacgcgcccgaccgggaccgagctcaagctaacatcgactcttccctggaccttgacgcgacggaacaacctatctatcctatcgatcccgccctagctgctcatcactggttggcttcaagcatactagccattggtctatctcccagagacctgaactgggacatcgtgatcggacagacatggctcggacggcacacaaggccacggccaggaaatcaacgggtggaaagaggcccagcaagcgactgcctcccgggggatcggaacgtgagcaggactagtgcagtgaattggtacttggagaatgctgatggtcctcttatatcgtctgcagctgctccgactaaggtccgtcggttccgaccgggaaccgtagctttgagggaaatccgcaagtaccaaaaagacgtcgggcttttgatgcagaaggcacccttcatccgaatagtaagtccatgcagacttcgtgctagtctcacaagggtccgtggccgatccgagcgtgtccgtgtggacctgtaggtacgagagatcactcaggaggtggctcctcatgctggaagcggtctgcgatggcagagtgccgctctgcaggctctgcaggaggctacaggttagcaccattgctctgttagaaacctcgagcaaagccagactatctgacctccccacgctgttgttctctcgtctacagaggccttcttggtgcacttgttcgacgattcgtaagccgggatgtttaatcaattccggtcactggtagtcggcactgactttgatacgcttgtcacctctcctcttcgccttctcagtaatctctgtgctatccacgccaagcgagtgacgattcagcccaaggacatgcaactcgcacgtcgccttcgaggaccatggcagggcatgcccatctaagcaggaacggcccggccttccgacccaattgtccagcagcactgttatcgtccgatagcttcatcctgtgctttccggatctttcacccttcagtttcgaacgctctcagcttcttccattcgacttaaccccaggccgacgcgatcgtcaaacagccgacccacaaccgctacgtccgaagcctcgcaaagaccccatttctatttcgctctgctttcctagcttgcagaccagttgcaagttcttctacaacaccgtgtcagcctcgatcttctgtactatgacgctcaaatatcgatatcagattttggcatactgaaaggtcgtcgtggatatgcgctgcagagatgatgcattcaggtgcaaacttcctcagcgacaataggattgccagaccggccgtttcgtcactcgatagctgaaaaggaatgaacgcaagacgctgctctggcctttttggcatctttcttcatagcaagatcgtgctatacgggtatccgctcaagtctcacacctacagctgcacactagcagaaacccttcgtcctccagctaccaaatcatcgatccttctgtatcatggctgccaagattagcagccttgacaagctgtcagttttccctcctctcaaatcgtccaggcagagagctcgctcgtgctccatagcccatcgagcggggtctgtctttcggatgcaaatcccaggtctgctcgaccctatcttgaccggattgatcgccatattccaacatagacagcgtacaactaccctttctccagatcttcatttcgagcaataacaaacagctacggtctcgatcgcatactacacactgtcatacccgataagacatagaccttggtcgaccacaccccagtttgtcaccagcggcggcaacctcgccggtacccaacatgggtaaattcctcctcttgaaaacccttggcgccagtgtagaagggtgaaaggtctcaatgagatgaaggaagaaattaaagttttaaacgagatgttgaaggaagaggtcagaggtcgaaacgatttgaaggaagaggccaaggagcaatctgaacgaatggtgaaaacggatggacggctggacgcgattgaagtagctgaacgccagagggaccagaaggttggccgattgagcgctatcgtatctaaagctgtgccatggggtgagcatcacaaagtgcagaaggagctacacgaagagagaaaattgtgggtgtgcgagctgagacagaagatacgtcactctatcgaaacgctgatcttgcatcgtgccggcttcgaatccatcgtcaccgataaaagcaatgatgccacgagacaggagttaaatgaggctaggaaacgatggggaagaggttggatgatatggagcgtctccatcatcgagacatagaagaatgggttcaacggcagaagtttttgaaggacgagatacggctggtgtgagtaaatggtgggaggacaagatactacctctacctctagactgatcgtcatctcatcagtaagagcttccagtcccacaaacaagagttgcatcagagggacgactgtcgaagtgtccctcatgatgttcgctccgacatacgatctgctagcacccatcagagccaggcctacgacttgccatctcgtgacggagtcagcgacttccgagggttcaagagaaagcatgccgacaggtacgctgatgccgaggaggatcatacagacaaacgacgaggtcatgacggggaggaatgttcaaagaagcgacgggtccctcacaccgacgagaaaacgtccgggtcaaagaagcgacgggaccgtcaccgcgagtgagatccgaagggcgggtcgatcatcctacggatttgactaccaagtcactatcaacgatctcggtcgatgacgtgtcttttctttactgctgtgtcagttttttcctttcccctttggcccgtcgctggctgtcgtgtctaccagctacccatctttatgttgtcgttgtgaactagctaaaccgatcgctgatcgctgatcgcatgtcaactatgttcaaacctaatcactcatgcacggcccgcgcccctactcctgcgccgcgcgcgctccaccaacttttgtttacgatccaccggccgcgcgcgccatgggcgtttcagacttttcggccattgagaagccacaggaacccgaaaggtaggtctgatcagatctgacatgatcatgtggctgtgttcacgatgccgtcatcgtgctgttctgtattgaatacagagtcttccagctgtgaagacgcttcacagactatcgcgatgagctcgacaacgaaagaagcgcattcttaagcgcggccagaccgtgagaaatgactcccccgcctcgatctgaaccagtcgttaccagggtcgctcgtctctcactgagacgaaatcaacatcgagcctcctctccgaaagtggttcagactttttcgtggcaacccattgtaccatgtcctcttctcccttctcgcaatctctgtttccatctctatctctgtctctgtccgacgcgacctgcaagtgttttcgcgtggttacctccgttctcgcctcactgatttgttattctaaagtaacgaggatggggacgatcggtggccattctcgtacgtcaatggcagtctctttgcaagtcacgagacttagagctgatcttcatcctcgcatggcacaggtgaggcttcccaccatatggatgcgcacggtcaagtcttccgaaagctaagtcaacctcaatcgtgacctcagtcgatttaggctgacacttctctcgtctcgatacagactgataccgcaaggaccatcgctccctcctgaaaagatttcggtgtcagtcgaccttcctcccatagggacagtagtatttgtcccggcggtgaaactgccttccctaggtgattgacgctgatacttctggattaccacacagggcgggcactgccccgtagggttatgacttcggatcaaggtcatcaagatcggcatgaacgagtatgcagccatcatgtcagctgctggtatcgtaccagttgttggaacgtgaggacaaggccccgggggcccggcttcgtgtggaatccaatccctccctcaataaccggtagtccgcggtggtactgcagaaagtttcgggacgggcactgaagacgggggggttgacggggtccgcttgaaggaaggcggccactccctcctccgtggagagagacccgttatgaaagtgcgagtcgtctggacggatagccatcgccgtccgcctttccgctaccgaagtcccacaggcgccttacaccatttggcaacaacttcgacaaccggcagcgacatcggtatccggcggcgacgacatcggcagacttctggaccactccaacattcgtcaaggtgtccggcggaacagagccggcggaagccacgacaaggtaactacatcttccggtcttcatctcttgcctcgggtatctttcctcctttcctgatggaccgatctataagaaacctcaggacaggatcgagaaacatttaccaaccgtgatttcggcgttcaagaggccttagccctcatcgctgctgctgtcaccaacgctgctgccgccaacgcctcgcagacgtctgcatcgacatcggcaatctcagtatagatcgaaatccgtatcccgtatccttcatttcgttatcagcttggaaacagctagccgtccatgttcagtctgtcgttctggatctttcatctctagatctctagatccctgatcgcccgtcattgtactacgtagattcccctcctcgtgcacctggccgattctcttgcgtcatccggaaattaagtcattttcggcggggcgcgtcattattgttctattgcgtttcaatgctctcggttacggggaaacacggcgcacgatggagggaacgtcagtgccgagcgatgacgaaatcgcagcgaatgttcgatttgtcccgcttttgggatgataaagtattgatgatcaacgttcagtaacccagccattcggcaatcaatcgcatggacgcgtatgtgcgtctttgaacctagatgggtaacaagcctgacggaacctaggtctcgaacgatatcgttccggtccgatgcgtgatggcggcgtgttttatgcaggaacacattcaagacaaacatgagaccacgatgaatgtcacagacgcgtatcgccgagtctacgagtgtatcgctacgagcacgagcgaccgatgaatcctttgataggttagtcgacctgactgatgcatctgcgtgaccatgtcgcctgggacaagggatgtcttatacgtgtcaccatcaattaccatcgtccaccttgcgaatggatggtagcctgcagcaactttatgccatgaatgcttatcggcgatgcctctaactgatcgggacgcagcgcttgatctgtcaaagagccacggaaaagcgggtcagcttatgacgggcgtgagaattttcccgatccgggctgcctccacgctggcccgtttccacgcagccagcactctgctctttgttactgcatgctggacgatataaaggatcgcttgccactcgaataccatcaacacatatgtaatcgacactcctctcgatactttttcaacaatattacggtgactactcagtccaccgaacctcttcttgcttcgcgttttgtcttgcatggggtcttgcctgtcatgtctggatcgcggcctgtcctgtcgtcttgatttctattattacgaaaatgaacagccaatttacggttactgaccgcttactattgctccgcatgtaggcctcgccttcgcctcattctcgacaacggatcggcaaacctctccgcataccaccctcagcaatctcggaccgcccatcattcccaggtcacgatcgatcacgtacatcaacaacttgtatatcgtccgttcgcctgtatcgacgggccgctcacagacatggtccgcctatcgccattcattccccgccaatcgatttggcttgcaacgctaacggcaccagctgtgcgaatcccccgctctaagcacagtcgccactcgctatactaggatcaagaccgcttctctctctctctctctctctctctctctctctctctctggcaacacgggactcgggaccggatcgaaggatcgacattaggacttgcctctctcggaacctggaacctggaacttggaacgggtggacacaggacggcccctcgcggaatacggagctcggaacggacggatcgcttctctcgggacatggatctcagcacggacggatcgtttctctctcgggacatggatctcaggaaggatgccctctctctctctctctccggacacggatctcaggacggatggctcgtctccctccggacatggatctcaagacggatggcctctctctcggacacggatctcaggacggaccaagaacaggatggcctctctctcgggacgcggagcttaggacggatcaggatggaatcttcctacggatctctggcccggattgactgattgaagataggaaggactctctgtacggatctctggcccggatcgacaacaacatcgcccatcgcgcttcaaggtggcctccagtaagccattccgtaattcgagctagatgtgctgtggcttctccggtgactgatctcctcgtacattcaggattttgtgactgacaataacccagcatagcctagctagcttgttggttccgcctttccccaagacgtcggtatctccctcctgcttttattgccttttagatttcgtggtgatcaagacggtagtgccttcaagaggcgagaaacgaagcagagtcgaacggtacgtacacgttccatccactttcatcgcttgggatactgattcgattgtcaatgacagcgaacgctatacgggtccgataggcggcaaaagagtagtatgtccggccgagaccgatcactagcccgccacctggagaacgcgacacagaggtccgctctcggtgaatggcttctagactgtcgcttcccgcctgtcctgtctgagcagatttgcactaatccattcgatcagatgaaggcatggaactgtcaaaatttggtcttctctccagaggtgaatcactacgcggacttaacaaaggtaattcccgctgctttcttgttcctgtctcttctcgtttcggttttcgttcgttcgggttggcgcaatggtgaaagattttcgaccaagaggagattcgcgagaaggggaaaactcttcaaagcaaaggatgtgcgaatgaaccacgacatgaatatcttgctttgaactcgatgtatacttagcttaagaatctgccgatataacattgtctggtctcgtaataagtttcccgttgacctcgcttgccaaccgttttctggctcagcgatgtcagtactgaagcgttaggattgtcatctttaccgagatagcgtatttacaggtgcagaactcaacttcgtcattcctgatcaggcgaagaatgcaacattccagatgtgacactagaccagctcggtctgcattccgcaatgataatgcacactttggatttcggcagcattttcggaatccaataccaacgaggtggctccagaagggcaagctacggcttgccgctaattgagaaccctcgtaaatcgaaaggtcgtacaactgccacgtgcttcagccataaatgtgataccaatggacggtagtttgcggcggcttgtgccgaggaatcttaattgatatcaacaacagcaagagcttctctgtgtgagtgacacgcgtcctctcggacttgaggtagggcagtgtctggattaatatacccgcacggaatggccagctgttaagagcgtacgaaatcggcgccaagatccgcagatgagaaaaacgcattctcagtcgtgatgtcggcacgtcctggcgaaattgggctcgacgacgagagatcgtgattgcgatataccacagcgatactcaaatcgatctgttgcatttctctcacaatacccccagcattactcggaaacgacgatcggattgcccttgctgtcttgcgtacacacgggtggagaagttacatgtaccacatgaccattccgattcaaacgctttcgacacgccgatcatcaagtacctccacatcaactacagaccactcaaagacagtgattatctggatggtccccttcacaagagcaacagcctcagtgggagagaccctcacttcagactgcgtacgatcacctgcaaccactcgtcttgatgttggcaaccctaacaaggaagagcctacaatgcccctttggaactacctttggcgcaccaaggctaggcgctcttgagtcttctggtcctctgctcgacgttcggccatacaggcttaacgtcgcgaagaatgccccctcgcagggcactgaggtcgccaagagagggattgtcgaagtgacagatgcggagctggagtcccatcttggcaaaagaaggaaatctagtgcgcctgaagagtcagagggagaagacgtcggtgccccgagggtcacggacatcggcgataggggctgcccaaactcggaggggacctataccatcccttaacgaaggtgatgattgacgtgggaaggtgaattaaatttggcctgacttggcgacgtctcgtcttgatgagctgaccatcttctcagatcagagtcgccatttccccgcctcacgtcacacattccaatctctggcgacttgggtcgagatacatgcaactgactctggcaactctcctagatccacctctcgttccttcttatgtctctgattgggctgtctcgccatgtagcatctagcaactttctcgcttcacggtctctcgtactctcgttatgctcgtcacgagtcatttcgcatatcacgacgtctcctcctttgttctcggtttcgctgcctcccgcgccttcgcccccctcctacgccgatacgtcatcttctgccaatcgcgtcatcgctcgaacgtttcaaactcctcggcatcgctgcgccggggcgaccgcgatcacattattcggtcatcagcaaacatttctccggagtgcaactttctacccgtgatttgacatggaaggccttacttgaaaagtcctatactaaggcgatccgctgctcttacagtctcagtgtaggggaatgaatctgctgtcggtctgaaacacatgacatcgaatgcgttcaagtgacggttttctcgaaaccgatgttgagcgattccatcatggagaatgagtgagcgatctttaatcgtgttcgcgtgtttttcgaggtctcgtctcaattggtgcaatttgcggctcttcaacacatcgacttttacacttcatgatgccatcgttgtatatctggcggcggcggacagaccggctgtacagagcggcacgctataatgatcttgcatactgattgattgacgtcggcgatatgatgtgctacgatgtggcgacgtttttggagcgcttgttgctcggtacctcatggaatagggtgacgctgatctcgtgagaaagctctcgatccgggccagcacaccgtttttcgccaccatgccccccctgcggcgagtatatagttggacacacatatcgatctcactcaccttcacgactctacctgcttctactcttctctcccaaacatcatctcgatgatcatcatcgaaggtctgatctcttctgtgcccgtctcttcttgtctcgttctcctctctgttccttcgctttgcttctcgagttcgtacgatgcacagccagtctccagttactcatcctccttgtcgccatccttgctcagtctccgacctcaccacaccattgctcacggatctaccggtttcacctccccgactacccgctcatctctgacgtcctacggatctcatctagtcatccgctcgaacaaatcattgaccttgtactcgctcgacgtcgccaatgccaaaatcgactgaactctccatgccatctcgtactcaatcgaaccgactcacttcacctcaccgcctgcctctctcgatagactcctcgtcaccgccgtaccgtcaccaccataccgaccaatgtcggccgcctctctctttgattagtacccttcgccccgacctcactccggcttgcctgacagtacgaaggacaccattctgactagcttcgatgcgctcacagaacacctggaccattgactcctctgacttttcttacagatcccgcccgtattggatggcgtagtctttgccttttgtttaacagtctggaccactcgaccggctcactggatctcgcctcgatgacaatcgtacaccgtcctcggagtccctatctctctcccggggattaaccgcaccggtcgatcttgcccttctgatccacgccgtcctcggattctctatttctctcccggagtctaaccgcatcggctcgtaccgcttaccgaacacacatcgtccccggaagcctctatctctctccaggagtgcttaccgcatcggtccatctctctctctctccccccctctcttgaactgctcgaagccatcttgaatctggtcacgataaaggtaaatatcgaacttcgctgcttgttcgttcgtgttccggttcttcccctttccttctgcgagtttcttctgggcttgtgactgcacgacatcaaaaggttggatcgttcttaaaggaaggcgttcaaaggcggagaacgtggtaagagggaacgaggaaggttaacttgcgagtcgttgcatgagaggagatgttgtacacagtcatagatagaaatcatcgtatatcatatttctttctccctgactacgcgatcggcatccaagcactggtacctctcttgcggcgttgatcgactgtcattggcatatgcgaactagacaccgaagcactagattgtctttgagttcatcaccagcagtcgccagaaatcgtcctgaaacaatcgtcatcatttacataagagcctgacatgcttcttccgatatgccagacagtccaagtacagacttgttatatggttgtatgccatggtctctcgacgatgaaaatatgaagcacaatggcatagggatctacccttgatatggccttacgatcaaaggcatattcgatccctctggaaaccgcttgtcccaagcataaggccggttcgtaaacctagggaggcaagacggttgagccggactgcaatggagagcgcgggtgatcgttgctacccgaactcacatgttccacttgtaaattctcataccctcaggctgcctgaactcgaattgctgaaccagcgcgaatagcgtcgacttcaccctgcataggtgaggggttaacatcacttccaccagtgtttcgataccgacttactcgatcgagcccatcctgtatccaagacattttcggggaccatcgataaacgtgaggacattttggtcgattccaagaccggtggacgccagaacctttgatcctgcccatcgatccgggctggcggatagatccgaagagtcaatgtgagtgctctgcaagctttcagaaagacgacttacttaaactcgagcgcatcatcgccccagaacaggtgcgaccaattcagtccttcgatcgggatgtaggcctaacaagaatcagctcagtggtcagtgatttacataagaaagacgaatggccgatgattgactcacgtattgacctctacggatcttgacctcggacaccgtctcgccgtttcttagaaggataggcttttccaacgggatgatgtcgtcattcatggccatccggatctgagtgcatgggcaagtccttactcggtcagttcctgaatataacgtggatccaagatggcgctcacggtagtgggaatgctaggattcagtcgatagacctctttgacgaccatgtcgagcagcggaagggtgtcgaggtcttcgagcgagatgttttctccgtacgccgaacattcttctcgtaaccggttttgcacagaaggcgaacccgcgaggtgatacaagcaccaagccatgacgatcctgcagaaagtggtcaggcatagcgtcaattaaagcccgtctcgatgtctggcttcgcactggccgacttacgatcccgtatccgtaccagcgaactggaagcacgtcatgttgcgacctcaggtcagccctgatcggtgtggaagatccggtaaccggctcaccatgaaagtagcgagcgctccagaaatttcaaggtccgtcatcctctcgctcggcttcatggccatatccgccttgactgttagaatcgacttcgattcagccatctcattcgttccattccagcgtggtgtcgcagcctcggaaagcgagactcgccgataagtgtaagcaagtctttcccctttttgccatccagaccctctaggccttgtttctcagcttcgacgagttccacttttttcgccttgacgagcctttccgtcaaatgatcgatataccccataccctcgatgaccctcctcgagttttcggtcggctaccgtcatgaattctcgaatcagtcttgcggctagagggtaccacgacacctcgtatggtgctcacccagatcttgtcaagtccggggagcacgacactcaacattcctctcaaccccgtcctccccgcgcagacgtcgaacatccggtcatacgcttcgtagatcctggacccttccccgtggcccttttgtatggcttgtgtgacttgggcttgacggtggtgcgcagctgctttggctttggctgattgaagatcttgatcgatccgtgcggagccgtgtgcgaaaatcggttaatgatcacgtctcccggggtatatgctgccgaaagactcacctggtgcttcaccagcagagccttccgggatttcgtcctttccatcgtcctcttcctctccgggccaggaggtaggaaacatctcgccctcgatcccgtgcaacgcgtcgaacgcatgatcaaacgccgtcagcccgatgatatcaaaactgagcctgttgagaccatcgaggacatccatcaagacggctcctttcctcctcgtcgttttaccgagcgtgtcccgctcctggctctcatggcgagagagcgcgtgattcatcctctccaaccagatccctctcaactctgcacacttgaatttgaaggtaggcatcatccccctgatattcccctggctgaacaacgggttgacgatcctcctcacgagtcgatgtcgagggccttcggcgttgatcaggccggaacggaggtatcgacccagggtcttgcggagcatcgggggtttctcccaggtttcagtgttgcggaggatgtggtgcagagctcgacggtcggtcgtccatagtctatcccagagctgtcagatcgggtcgagtgtgttctggtcagcgttgatcggtcggcagaaaggaggaagggatcgagtacgatatacgtacgccgaaaggacccttggtgttgaaagtctgtccgtaagcgtccgtccactttcgaaagtaacccggagcctgctcagggctgtcaaaagtccatcggattgtcagtgatttcgggactcaagggactagacccgactgtgtgacccgaaaactcactctagcaactcgatataatgtcccgcgggtcctgttccaccgtccggtcctctcaatttgcgtaaagggctcgtccatagtctccaatatacaagccggaaggcaagagcgatgccgatagctatgagccatgttgcgacggcgagcgtcttgttcggcaagaagaagtgcttgatcgcaaagtcggtgaatgtcgtcgacatggttcgtgtggccgtgatgattcgctgtggaaacgcagatctggatcgagttcgacatgatgagaagtttctattctggaggacatgttgagaacgatattgaatgtggtatctagctggactcttaccaccacattccctgaacaaaagaacgaattcaacctctttcaaaggaacaaaagacgaccaagagcgatgagacgagtcaaaagctggggaccccgcaaaactagaaaaaacagagtcatgtccgtcagtggttttacatccgatcattcatgtccgcgagctagtcgatcggaagctaatcctcgtccactccggcgtctaccggtccgaagtcgatgcccaacaactcccgttgaaccctggcgaataggtatataccttagagcaaaattagaccggccgcgatctagaaaaaggctactgagactcaagcaatcaccccactctacctacctctataccattacatccttgggtatccaccatgcagaaacgcgtcgcatgcattaccggagcatcgtccgggatcggtcggacctctgccatcgccctggcgaagacgggtcaatggcgtatcgtcctctctggacgacgacaggaggagctcgagaagaccgccagattgtgtcaggaggccctcgttcagggagggtcaggatcggagcaggaacaagaggacaagttgaccttggtcgtcgctggagatgtcagcgtggagggcaacgtcgaggctctgttcgatgccatcaaggagacgtacggtaagtcatactcgaatgttcaatcgtcgaaactgagcacgctgatcgaatgcgatgtgatgatttctcacaattccaggccgggtggacatggtcttcaacgtgagttcataagggtatcccctgacaacccagcccacccttttctgattctcccgctacctttccttccacctcgacctcctgcacctcgtacagaacgccggaatctccctccccgagacccccatcgaagaccttcccatcgagaagttcctctccctcatgaacatcaacgtcaccgcctcggtcctctgtaccaagtacgcgactcggctgatgaagagccaagagcctaggggtggcaggatcattaataacggcaggtgagcatcgtccggacgaatacatagtatgagatagagaaaggctgatgaaatcgtactcgtgctcatgcttgtaccgaccagcatcgctgcgtactcgccaagacctggtaagtgcctctgcgggctatcgatgaactacctttctcctatcgctgatcctcaattcctctttggcctcactttagacgccgctgcgtacacgatctccaagcatgccatctcagggttgaccaagtctacctcgctagacggccggaagtacgatatcgcctgttgtcaactcgatatcggtcagtcttgccccttgcgctctggatctcatcccatcccgccgtctcagggcatcttcgctgatcctccgtcactacctctcctaatttcgacctcccgacttacaggcaacgctgccaccgagatgggcggcggagcggccaatggggtgacccaagcggacggatcaaagaagcctgaacccgtgttcgacgtccagcaagtcggggacgccatcgtcttcatggccgggctgccattgggtgcgaacgctttcaatgtgacgttgacgtgagtcggctggaccttttttcgggtcggttcctgggctggagaaaaggatggggaagctgattctgggtgatgacggggggattccttcgttcataggtcgagcgcgatgccgttcattgcaagaggatgatcagtgaaaaaagggtgatgttgttcctaagaaaacatgattgtaagagagacctgtacttggaacacgtggtccggacctgtactgggaacaagttcgcagcccgttggatcatggcatgtaaatacgtgagaaatcacccagtattcagcgggagtgctctcgaccgcgatgaagcgataaaccgttgagccccttgtaatcgctcagtgcgctctctttcttggtaccgttcgcaaattcaaagacgtcttggtggttttggcgacaatcagctcgacgcaagtgactgcgacggggacgctcggagccccggatcgtctgctttttcgcccttgattaccagtcactgtgaggtatagcttcatcctcatctgaagcaggatgcggccagagtgactagttatttgacagcctcaaggcacttcgccgcaaatgtatctgttcgacttaggggatcgcggtcccgctcggatccgacatgaactgcgatttccgagtcgcgtgggccgggccgactttacgtcacgcgttcttccgggttcgttcttttcaaaaaacccgagggccgaggaccgaggaccgaggtcgaccgagccgaatcgttccagcgcttgacaacaggttccttttgacgttcaactcgcaattgattactaattactaaccgacagatcgacagatgactgcaacagttcaatatttgatagaccatagctcatagacgtacagtaaaccgaacatgttgtcgaggagtcgggctctctatgccttggccggctcggtattttttgttctgttgatcctcgtcaacaaagcccgagaatcgatttcacctttccgagggcccgactacattccccttcagcatcaccagcacgactcgaaagaatccgagccatcgtcaatctggagggaacatcaaagcctcgtccacaacaagtcacaaccgagaactttcctgttgcttcccatcacgcatccttcgttggggttctgtcaatccctctacaccgccctccttcagggatactctcccatcctcctcaactggggtcacgatcttcctcccgcatggaaattctgggaccaaaaagtcttgccagaccgaatgagtaagattcggaaaacggcggactggttgaatgcagagggaaatcttggggcagggtggagggttgacgacgtggtcatcatagccgatgccacagacctctggtaccaggtacatgcctttcgatcctgtgatcatcatcgccttcggccagatcgctgattctcgtccgaatctacctgtgatgatttgcatgcctgtatctcactgctcgctacggcactacgctggaacacccctgtggaccaactaccatccctacaaacgaacagctgcccaagagctcaatgatcgagagattcgtcagtcatctctcttcactgattaccttgagtccgcacatcagccgaccgtcttcgaaactcttcgaaatacgccttggctaccgcagctcaatcaaccgtttgacattgtcacatccgccgaaaagttttgctggccgagtaaccaaaaattcatgtgcgaagagtatgaggatagggtacccatggcggacgtgatcaacaagaatggagacgttcttttcagaagagatttgccgagatttgtgagtcgggcggatcctcttcacgccgaaaaactttccagctcacccatgacccgttccgcagtccaactcggggttctacatcggtcgagctcctcaactccgatccctcttttctcacatgcaaaagctccttcccttcaccaacgtctgggacgaccaagggatgctgcactacgagacctactacggcaccgaacgattcaacctgactatggattacgccagctcgatgatctataccatggcctttgacagtatcaatcatcacctccgagcactcgaagccatgcccgacgctcaaaactacaaggtcggcgtcaagggtcaactggacgaggtcaaggggttggaaaagaggtcgttcttcgacgacgacctgccctggttcgacaggaacgatcgattcgtgcccgaaacttccgagggcggacccaatcgatgggcgtttgttcatcatcactggacagaccggacgagcggtgcggtccattggaacggggataacaagaatcaagctgttccgaggacttggtaccgtatgtactgggccacaggaggttccagagggaccgatctgcgagtcatgcaagaggcagttaggaaaggcaaggtaacggtcggggagaccggggtggaattatcgtgggacaaggtttgcgggaagtatgggttggccggggagcatcagtggtagacggtttatgatagggttacatcttgacataacgatccgtgagtgatcaacgtcgcatggccttgcttcttactcgagctgatcgatgatgggtctgcagaccagaacgaagggtttgacgggaaaaaccatgatgaatgacaatgagaacgctgcagagcaggctagagtatgcttccaagacacatcacgcgcttaacgagccctcaacgacctgtcccccatgtaaaatgacgaataatgattgtgtccgattcgtatgttgcttacggttcccgagcgaggctaccgaacccatcgaacgctcaagctttccgcgaaatcgagaacaaaagagatcaaaggtcgtggaatcttgccgccgaatggtggagggcgcgggagaaggggaagaaaagcgtcgccctccatcccttgtgaccggcccgtctctcccgtttcatcatcgcgcgtcacattcccttttgtccctcccgagctcgggctcggtcacttcagccttcccgatctgaattgtattgctgtgcagcgggatggattgcatttgatgtgcgtttcgaactttcaccggaaagaggcttggccctgggccaacggtagaaagatgggcgtgaggccgagactcgctcccaaatcccgcatctggctttgtcctccaagcggggccaggtggccaggtggattgatcttcgtccggtgccatataaaccttttgcaaaaagatcgaaaccctcttcccgttcccgacgagagatttcgttcatcatattcatacactttctgcatcatcatcgactacaaccatagcccggagcttctcagcgctcgatcaatccgacattctacactcgtttagcatttccctcgcggcacgccggtcttttagcgcgatcacgccgaacgtcctttcgaataaatcggtcgcctcgcttccatcaaacttcatcagatctctcgaacttctccgattatctcccaaagcggaagatccccgcctttgactgattcgaacgacttcttgtgatcgagaaacacgcccttgcctcgccgaacgcatatcacggcctctcttgagcaccatcacgcatcccgctatcaagctatcaacgcctgacacaacacttacgaccaagacgacaattcattagactgccgaatacaagcacaaccgagcaccacgccgaacatcgttgatctcacttgatcgcattaacaagcaccagcccgtgcgaccaaatcagataaagggacttcggaacggtaagtgatccgaccgacgatactcgctctacccctttcctcgaatccctttgatgtggctcgctcggcgtatacttagctgacctttgtgctcgcatttcttgaagaactttcctcgtagagacccaagtcaacgacaagcttcttgccggcaatattctctcgcactctggtagttgatctctcgacgattcgagcttgatttctccacgcacaccttccagcttctcaacttcccgctaccttatggacgtcaagcccgtcatgtatcaggctcctcttcaagcccaacccggaatccccgctcaggggatgcccatccaacaacccgctcaagcacaacaagccgctgtcgtacaaaagcccgctcagagtaaccggaacgctcaacctcctgctaatgagcccaggaaggtcaagtttagcgtgggcagggattaccaggtgataaccgtcattggagaaggggcttatggggtcgtcgtccgggcggttcatcgagcaagcgggcgagaggtggcgatcaagaaggtaagaaccgcgattatgaagcgccgaaaacaaatggaactttcacgctgagctatatgattatgttatccggatcagatatctccctttgatcacgtgttgttcgccctccgtacgttgagagagttgaaactcctcaagtatttctccgagcaacaagtcagcgagaacgtgagcgtctcccccctaggtgtctcctgctccgggctctaccccctgcgttggtgatagtctgaccccttctggactcggccacagttgatcaccattctcgacatttgcaagcccaagtcgtacgatgaattcaaggaagtctatgtcgtacaagaactcctcgagaccgacttgcaccgggtcatcaggactcaggatctgagtgatgatcattgccagtactttgtgtatcaggtatgttcccaaacgctggtaaatggctggagtctttcgttgagcatttgaacttggtcgtttcgatagacctgtcgagcgctcaaggcgttgcattctgctgagagtaagtttgaaaggtgagaaccgcatgtgcagatagagactgactttatattcgcgctggacagtcgttcaccgagatctcaagccttccaacctgcttctaaacgcgaactgtgatttgaaagtgagttttgcacccccgtgctccagaaaaccgatgtctaaaacgagcttggtccacgtacaggtctgcgatttcgggctcgctcgatccacccagacggccttgcccagcggaggagacaatgggtacatgactgaatacgtagcgacccgatggtacagggctcccgaggtaatgctcagcttcaaacagtataccaaggtcagtagaccgggcctgttcggaattcgctctgaacaaccgctgattattgttcgtcccgtacagtcaatcgatgtctggagcatcggatgcattctagcagagatgctcaatggaaagcctctcttcccgggcaaagactagtgcgtgaccagatataacggtgattctccacatatgaaaagctaacctgaacaccatatggtgtgtatgttagccatcaccaactcagcttgattcttgacgttcttggaacaccctcgatggaagagtactacgatatcacttcgagaaggtcgagagagtacattcgagctctgcccttccgggccaagaagtcgttcgagagcttgtacccgatggctagccccgctgctatcgatttccttaagaagaccttgacctgttagtccacttggctcggtgcttggtttggcaagagctgaccgcttccgcacgacagtcggacccaagaaccgaatgaccgtcgagcagtgcctttcgcacccttacctcgaagcctatcacgacccggacgacgagcccgatgcggctcctttgcctcacgactttttcgactttgacctgaagaaggaccaggtcaccaaggaggagctcaaaaagctcctgtgagtagagagattcggcgatcgagtagtttggccgctgacgggattcaattgacagtcacaacgaaatcatgacttttaaccccaccaagggctgaggcgtggatgctaccggcaccggcatcggcaccgatagccatttcctcttccctgacctcatgacacgacgatgatgagcccgttccgtattcttgcctggatgttttttcgagtgatatatctatattgtgctccgaccaggggcctctgctcattccacgttacaaccagaccgctttctatgatcttattggtcgatgaatcgcttgaccttctccagccaagtcatgtattcctacggagggcacacacgaatcagataggcgaactccgcacataaaatctcaaatcgggctcaccttctgctccttgtattcgcagtacaacgggatgaaggaagctatagatgagacacgttccaagcattgatcagccagcgattcggacgacccggccggtgtagactcacccaaagtctggttgatagctcgctcgtccaagtagttctcgaactcggtctgcacggtgctgtcaaggtgatcaaagcctgacccatcgaaatgtaagactcagtatcgcattgatagtgcagtgattcgagccaagacttacgaggtccgacgtaggtcgcccttcgcttccagtcgccctcagcagtcatgtcctcggcgagtttggcgtctgagtagaattgagcgctgtcgataacgaaagcctcattctcaaccagaaggtccatgacgagcgaaccgccggaaggcttggttatcgagagggaacatcggatggggaaggtgttttcgggctcttcagcaccgtcctcgttggcagtcaagtccgatgtgtcgggtgggttgtcgaggtcctcgatcgagaaggtgagcttgagcctgaacaggtacggagagtatagatcagcggcgaatatcgctccagctctacgacgagacatggatctcacttctcgttcccaaagcttcgggtaagcacaacctcgccatttccaaccctgtcattgacggaccacacgccgttctggtggaattcctccaaccattcgggctcctgaccggccatggccgcttgcgagtccttttcaaagttgagctcctcctgcagcttggcagatagagcagcatcggctgagagtgcaatttgatgtcagataagacaaaattgcattggaaatgactgtagactcactctcgccaccacctagccttgccgagctagccatgaaggtcctagagatgggttgcacccaggcagcgcgagccacgacagggcgagctgccgggcgagcggtcgcaacgagagtgcgcgatgcggcgagcgaaacacggatagcacgggcagccattttgtcgagtcagttgggatgcgagaaggtagattgaggctcaagtagaagcagtttacagcagctcttgcgatatacccatgcaacatctcgatgctgatcgctagaaaccgatcaactgggttcggaatcaaataatgaagcaaattcgacgtttcccacgttgacgtgtcaaaaggtcactattttgttcgtggcatcggttcgtgcatcggtgattcgccgcttcgacctcaatgatcgcgatggatacaaatggagattcgacgttacaacatcctctggccgcttgatgcctgtctcagttcgcgacggatttgcatgaggtccttccaggtcgacggtggaagccggacctgataatcgttgctggcattatagatcctgttcgtcatcctgctgatcctgttgatctcctcggaagacgtctgtccatgattccaggccgccagctgcatcgccgtcattctcgtcgccaaggtcagaagactgccgtcgggaagaggtggagatcggatgctccatccaaagtccgaggacttttgcttcatcgctttaatctggccctgatcaaggttcaatactgatgatgcgcctatgacgtagcgtacgatcgatccggccgagcgccaggcagcgagggacgggctcttgtaactcctggcagtcgacatgcccacatccttgctgtactctaaccctcggaatgacccgctagtctgagtcgacgagctagtcgacgaagcatctcgttgttcgtgcgcgtacagctgcaacatggcattatgcccttcgatcggtaggaaccattccgtcgagccttgcaaaccggccgattttgctttgtccacagagctcttctcggcgcgcaaagccagcaggtatagcctctcggccaaaggtgtgctttttgtccgccgcaaggcgttcaagcaagcgacaaagatccagggcgaccgtcgctttgccgcctcagccaacctcgtccgtcggtgttgttccttatgcagatctgcatactcggtatcgactggcaacggccggtaggtgtgcacatccaggaacggaaacgcgttgtaaacgatcgactcgatttcggtcttgttcccatcctggacgagccgcagtttaaagatcacgtcctcgtccttgagaggaggttcagggatatcgacgaacccggtctcccgttccattactttcaattgctggtcaatccggttgactcgaaagaaacccttccaatgtcctgcctgttcggtagcagggggcccgatcgtttccttgctcagcattcctactccaaaagccgacttgatgtgccggaaaaagttgacgatcgtcgctccgctcggcaaagccttggtcgcatagtgtagcaagacccgcgtcgaagtcagcgtgagcggtggtaagcgataagacgcccagcggccatgaggaaaattgagcgaaggtggcgaccataacagtgacatcaaggccgcatggatatgcgtgcctgcactgaattcggaccgattcgctgcggggatccgctgccatttgatcgatgtcggatagacgggtacctcgatcgacatcttgcgcatggcttgaaacagcgacttcagagcggtgacgggtagagtccttgacagaatcgtgttccctagaatggccaacgctctcgccgaacggcgataaggtcgattctgaacggccaggacggggtcctgcgttgatacctgcctggctgtacctgtgttactaccgccacctccccacgagacagcaggtcgatatgtcaacgaggaaatgataatgtccagcatttcggcgttgggcggcggtacgagcgagggtggtgacgtcggtgagggaagaggaaagtttttcatcttttcctgtagcttcagtgtctttgggtgccacaatttgagcttgtcgagcggggccatgccttcgcctggcatcctccacgtcctcacaccctcgaaccacccatcgatgatccgcttcatcctcctcgtttgtgccgcctgctccaccgctgcatcttccgcgtcggctgcttgctgaccgacgctcccggaagactgatgaggtacacctccttccccgaacaaggtcgttcccgcggatccgacctcggcgacccgtccttcaaggatccattcttccaccaatcctgcgaacacggccgctgccatatccggtttcccgagatgaacgcaatgccgcagtatcgtcctgtacatctcttgcgtacgcggccgcctcatcgtttgcaactgggacagcagggcgagagagtagcgaagtgcacgttgtctctgcttatgtgggcgctgagatgaagatgacgaggtcgaggtctctgtgggacgcagttgggtaaacgcgtcttccccgtacagttgactaaagatgatctctaggtgtgcgggttcgaggcgatctacgaggggcgagtcggcacgcaaggcttgcatcgccaggagtgccgtcttgcgagcgggggtatcctgagaacgccacgaaggattggaagctttagcagactgatcaatcagaccgtctcttttggattcgctagacttgccggtttcagatcctcgatcgaaacgccatcgaccgagtaatactgcgccgtagtgggcggtcctggtcgttcgccctgagctgcagagctcgcaacgatggaagcaagaatgtcctcgccatcaggagacattcgggttgattcatccccatatagggctggttccgattcttaagcagcgaagcagtctagttcagcgacgtctgtacggaagcgatcaatctgacgacatttacccatcaagatagcctcgggcgcccatctcctctcttccgcctggacttcgaactgcgagtcctcctcatcttcttcgatcctggcaggtcttgctgacctccaccggacctgttgcctcttgaccgcccaccctaagccttcagtggtcgagcaacacggtgcatgactcctcgtccgagctctggctccgataaagatatatcgcgagatcggccggaacccgatctttgccgctccacctggcatcttgccgagtattgactggctaatgtaaggtctctggtgtacaggactattggctttgggtgatgggataaataacctgaataaaagtcgaattgttccataaccacacttgaacccttagtgagtgtcttgttcgattgactctctgtttcgatttcaagcgcgacgcgcttttaatttcgagaccagaagggcaagggggagagggatctagcgttcaacatgacgaaaggttgtctgttttcgttcaacttgcatgttaacctagctactttgaatcactttccgaccagccagaacgacattagaggagggtcatatcaacccctcgtttgattcccgcaaaagcgaccccttgagcgcaagaaacgcgttaaaagaccgacccgggatccactaggaaacgatgagcggttggcgaggtggaggacgaggacgaggtgctcctcgaggaggcagaggtggtttccgaagaggttagttgagatttattcagagttaatggttgttgatatctcaagctgaaaatttgcggcccggtcggtttccgtcgaccagatttcccgcctacccctcctcatcgaggtcgagaccctgctattcaagctagggagaacatcatcttcctggccgatcaagaggtacgcacttggcttaccttcaagctggaatatgactgacacctaatacctccgatcttccaggacttcaacgtatcgacagatgttcctgctttagcacgatatttgcgtgacaagtggtcccttggcgcagctcccggtatccttgacggtttcgcatggaggtgagcttgccttcttcccgctatccctatcttgctcatgctttagctgaacacgcgaagaatacgttcaccctctcagtatcaatgaacaggcccacaaactcccttactacgccgccctcctcctagtcctctcgaaagaggaattccagctagaagccgtccccgagcgtcaacctcaattccagacccagaaccttgacccgatcacggaccgtatcaaagctcgggcgagcgcactggcttccaactcggattcggctgaccctttcgccgctggacttgcacctggacccgctggcggagaggcggaagccgaggttgaggctgctctaggaggtggggcggatgccggagacgagaagatgaaggtcgatgggcccatcgatggcgagcctgaagctggggaaattttcaacgaggtcgaatacagggcagaggaagagaggaagaggaaggagaggtgtttgtcctggttgatcatccgggatcttgggaccaggttcagggcttgggtggaccagcggagttggctcaaggttcgattggccgtaagtctagaaacccgtctgcattccttcagtcaggacttttcacttgatgctgcgtgtcttcgtcgatgcaggtatccttcttcggacatctcgtaccgatcggattggtgtcggaagagagctacctggcgacgctacgatcgttcatctcggtgcttgaggagctcggcggtggtgggaagcgatcagaaaaggtcatcagggtggtgacggaaggacttctcagagtgagtctaccagcagatgtattctgcagtgtcaacagacgcacaagactgacatcgatgttctgtaacaggccggacctcgtttctacgagacgaacaaggaagccgtcgatgacatcatttcgaccatctcgagcagtgtgacctcgcgagaacagtcccgggcactttacaatactgttttcctgcccgctgaggtcgcgcgtggagacatcaccccggaagccgatcagctcgacaatgttctatcgacactaaggatggcacaaaacaacggatttgtcaaaatcagctggatgcccgaacccgctcgacggttcatgcgagatgccgatgacaccgggatagtcgacgcttacgtcttgcctgtggtctcggtccctcccgaggcggaaggagagtcgaccttgtcccgcgctctcgaaggcgaaggtctgatcggtacattcactctcggaggcaagattggcttgaccgatgggcgtgtacccaacccatccactccagacggctggatgatgcagtcgatgatcctggacattctctcgatctacgaagtcaacaggatcaaatgcgcagagctcttgctcaagttgacggacttttgtttactcgacgttttcaggagcaaacctgcgcctggcgaggaggaagcggaaaatatcgccgtaccgggagagtggatccttgcatctacgctcatttcgatcatcctctcggccatgttcaagctgccaaaatcgccacatcacgttatatacctcacctcggtcgttcgagagttgtgtctcgccaacggtgggatgatggcccctcccgtcggtctcgccatgagaaacatcttttccgatttggggaacgggctggatatcgagattgccaggcgaacggcagaatggttctcggtgcatttgagcaacttcgcttaccaatggatgtggaaagcctggtgagccgttgatgctgaatgtcgcaaaagcgtttctggttgtgctgaccattccgctacactacaggatccccgatctcgaactcccaatgacacatcccaagcgagctttcatgcaccgactgattgaactggaaatccgtctcgcgtatcaagagcgagtgctagagactctgcctgaggagatgcaggatgagcgagacgcaccggctttgcagatgcctgacccagtatttgtgtacgaggatcccagtaagtttctcaataaaccctgtgcacctccaggacagcaactagaactgacgcaccgctgaattcgtcagaccattccgagcacgagaatgtaaacgaaatcctcggcatgctcaactctaaagcatcttgggaggatgtcctatctcgactacgagagatgtcagggtgcaccagtccgaccgatgtcatctcgcacgaatatcgacggattgcaatacacgccgtgctcaacaacggttctcgatcattttcgcatttcctgaacgccactgagcgatatcttaagctcattcaggaggtagcacatactcaaaagggacgacgcgagcttctggtctttgtccgtgacttttggcgaaattcgagccagatgcgagtcatggtgatcgacaagtacttgcagtacaacctggtagactacgaggacgtcgtggaagcgatcttcggtgccttttcagctcgtgaggaagacatccgagccgaccggcctaccgtgtggaccgattatcacgcgtgggagctgctcaacaacgcattgattaaaagcaaaggtcgattggtagcgatcaccaagaggatcactcagacggagcgtgaggatgaggcgattcgtgctaagaggaacgcgatggtcgacaacgcagctgcggcgaaccttggagaagacggcgacgtagacatcaaggaggagcctagtaagtccacctccatcatctcaagtctggtcttttctacagctgacgaaatggctgacctactattcacagccgaggggaaatcggagcaggtctcgcgagaggtccaggaattgttgcgacgcaagaaggaactggaaaacgaccagacaaagctcatcaccagggtcgtttcgagctttgtgaacagcttggtacccggccgaagcaacggtattgctgtgccatctcagcttgacaaggttgttgacggtgactacagcgatcctttggtatgggataccattgcgcgattaggattctaccgagagttcatgcgaactgtaagcctggccaaccccgagccgcgcacgagagatcatgtctgatgctgacgagcgacatgcctctcgcccattcttagtacgggaacgatgtcaaggaaagtgcagcagaattggaagccttcttcaaagatctacctgccgcagcggatcccatggcggaatcgtccatcctcggggctcaccttgtgcgcgtcatatacgagcaagcggtcactgtgcagtagtcggacggaatggtgtgtatcgatgctcaaaagaaaagtcccctcgatgactggatacatccgcataacgacgatgacggtcgatttcaataccatgatacagtgctattctggctctgcccgcatgcttttggctgtcctacttgtcctcatcatgcttctccttctcgccctgcggcttgccgacgcgatccagaccaaacttgtccttgttgcccttgccgtaagctcgctcccaggcgtctccagcgatgaaaatctccatctcgttgtacttggccgccacgagctgtagtccaacggggagacggatgtggcgatcttcttcggtccagacgtcgccgtcactcgggggactgaatccgaccggaagggacagggcgggatgacccgatgcagagtatgggttggtattagctgacatggcacctgcgaggccgcgtagcacaagatcagcgaagagttctgggttcgtcgtccaaccgttcacgtactgccagcgtccatgatgccttcgattcccttgtctttggggacgtgacgaggaggaggcttgacgcaggtaggcatgacgaccaggtcaacttcctcgaacatcgcatcgacatcggcgctcaattttcgaatctgcagcgttgcatgagatcacttagatttcgcgacgtggaagcagctgttcgacatgcggcgaggctcaccaagttggacgcgatatcgaaagccgtggggaagttgtgcgccacatattcggccgaaatgatttcgagcttgagcattggctccaactttgcagggagcagagattcgctgtcaacgactggcacaagctattgaggcacccagaaacctctcactttttcccacttttccggcgtccatggcaggatctggccccagaacgaacccaacctgagatgcttgctccccacactcctgccaacgaacggagccgtcccgctcaacaacgtggccacgctgttgggtccggacagctgaacgtgactgggacaactgatttctttcacctcggcgccgagcttcttgaaaccctcgatggcgtccttggcgacttcgtacactcgctcgtcacccttgggcacggtaaatccttccttgagcactccgatcttgactcccttgagaggtgcatcgggatgctcgcgctgagccttttcgcgagcttctatgaggcgtctcgtgtacctgggcagaggattaggcatcggtcgatcggatgttcgcaagtcgatccagtcgggtccagcgatcgtctcgagcaagaccgcgcagtcttcgactgttcgggtcatgggacctgtacagataaagagggtcagcattggtgaaagtcggagggagaagaaaaaagctggtctgtaggatactgaccgatcacctctttttcggcttcgtggctaatgactccggtagaaggaaccaacccgaacgtaggtcttagtccaacgataccacaagcgctagctggctatcaaatcatgccggaaatcaaaacctggatcagagaccgctcggcactcatcctcggaccccgtacgtaaagctcgactcacaatcctaatactcccgctctgatctcccccgatagccaggtccacctgattgctacacaccaaggctgcacatccagaggatgacccacccgccgaaaagcctttcgcgtgggggttctggatgatcgagcgaggagccgagcacgagatccagtgtcgggaccaggcgtgcagtttcgaatcgattgttgcatagtcggcgtcgaacagaatcgggtaggcgaggacgaggagatgaaagagagatgatgatgtcagcaacctctcgcttacatcagcgatcacgcgaaaacccctaggatactcatctcgcaattggccttgcccaagatcacacccccttcatccaagatcctcgtcacgcacgtcgcgtccatatcgctcacaaactctccttcgtcctggacctcggcgccgaacaagcagggaacgtctttgagcatgaccatatccttgatcgtgacccgtttgtccttgatcaaaggagcccgtcgacgtgtctttttcgagagtctggatccggtctcgtgtaggggtttagcgttcccctggacgtctggctggtccgcgggatcttggttcaccccgccttccttggcctgttcccctgcggtctgcttgtctttgtttgaaaaggcgtctcccggggtatgcttcatgttgaggacggcttgctcttcatgactatccacatcgtcctcgtccacaaactcgacgggtggttctttcctgaccgtagccttgtacgcccagcccaattcgagctcttcctgcgtggcggggaagtggatgttcgtcctcgggtacgtcggtaaatgggtatgtgggatgtaatccggttgactcagcgtgaactcggcggcctgatggatccccttgatagcgttcatatagatgtgtctcaaaccgtcatcgagaggcatccctagctttttagccatctcctcgagatcagcctcggtgggctcgggtcggaacttcttctgctccgaagtcccgggttcgggcgtgtacggtgaacccgacaagaaaggggtcgacccggatgtgaacggcgtcggggcagcagtcatcgtgacaggtgaccgatggaaatttcgggtcgggtagcgttgttgcttgggagatcgggggaggacgagcgacacgggtcgtcgtacacaccacttggcgaggtttagcgaaatgatggacgtgaggtgcagtgtttgcacgaggctagtctcagacgggaagatgtagcttgcgttgaccggttcgattgttcgtgtatgccgagctgggggagtgggtgttggtatgaggatgaaatgggtatggtcaacgtcgacaacgttgttagttggttggggggtgtcgttcttgaaccatcggttcccagatcgaaagcgagatcgagggaaagtgcgggtacgggactttttagcgcgtccgatcacgtcactttcccccgatcccctcccgcccaggctgtttctgtttcgtcatcaattccccggtcccgacactttgtaaacaaactggggaatggggaatgggaaaagccactgaatcgacgcttgctaccatcggtcaagcacttcgacgacttctgccatctactcggtcactttcatcagagttcatctccatgtgacaattcgattctcaagcggaatatccggtgatcattcaggaatgaaaccgaacatccgggatcagcgatatgatcatgcccacggctaacccgatatcgacagccggtttcggcgccccacctgtctcagttgatagatgttccgggatgatgatcaattacaggaccgtcctaatcgtccatataggtatgtagcgataaattctatcgtcagtcctcctcagataatccgtcgcagtctagtctcttctcatcaatatggcatcgcgcgccaccgcgcgtttgtcactcatttcacaccggcctctcggtgacggcgatggtcgatggagagaaccgacacgagcaggctgagatcaagacgtgttgtacggagtcatcgattcctgcacctgtacgatagaatgttagctggtagataacctcctttcgattggctagcgggatcttcagggagccggcaatggataccccacagtcggaggtcgtgcgaggtggccgtagtcctcgtggccgtggcgctcatcaaggcatcccgggtccatggtaggccggggctacctgcctcctagtggccatcccctgcccgtagacccgtttcaagaaaggggcccaggggcacggatcttgcggaccctcctttgaggggtttgtaaggggaccgcccatccagaaaggtctggaatggcaaccactgtttccgggccttgaacattcgccgcagcgacgatgggctgggcggggacaggagcctgatcctaggcctgggccagttgttgaggtatgaagcccaaatcctcaggcgtgaggagaccgtggtccatagcggcaagaccctcctctgaggggtcacatgaacgctaggctgagcgtcctccttacgaactgggagaactagagtggcgaccacttgttcaggaccttgggtgatggtatatcttctgttggtgtgtagccaagagcacagccgcatcatcaaacggaaaggggaccttttgcaattcaggaaatcgccgaaagcctcgacgaaggacattgcttcccgaaaaatgcgcttatagccaattgcagaatctcgctctgatgcgagcggtctcgatgtgatattgaccatccccgtgcctcgaatcgtccatacgacctgtctgactctcgtttgcactgctttcagcgagcctgtcaagctcgttcatcgcggtgcatcgctctgctcaatcagttctctcttctgtgtcgcctgccggtatatcctatccctccaacccattgatgctaaacttcagcagccttctcaggcttatggcacccggcatctgactttccgagaatccttttactcgaatttgctaatcactacttcgtacaacttctgaaagttcttaggtgcctgcttgtgcagcatcatacaagtgccgtcctgaacgttctggcacagtttttggccttccctcactcccactctcctgcctgcattagtctcgcaaatacccctctgtgcctcataagctcatcccatgttccttgctccgcgatcttgccaccttccaagcacaagattcgatcgcaacgccgcattacgtccgctttgtgtgtgacgaagacggccgtcttgccctccttgactttcatgatcgtgttcagcacggcgtgttggttttcaggatccaacgccgaggtgcattcatccaagatcataatgttcgaccgtcgtatcaatgcccgggcgatctgcagtcgttgcgcttgcccgccggatatcaaagaagcgttctcgcctaggttggtttggtatccttgcggtagcgacatgatgaagtcatgcacattagcgaccttagcagcgcgatgaatctcgtccaccgagacagcttgggtcccgtaagcaatattttcggcaacggtcgcgtcgaacaggttggcttgctggctaacgacagcaacgtgatcccgcagccacctgacatccgcctgttccagttcgaatcggtccaggcggatcgatccttgatccggttcgtatagtctttgcaggagcgctgcaatcgtcgattttccgcttccagatgcgccgacgatcgcaacgcaactaccaggctgcagctcgaagttgatacctgtcaagatcggaacatccggacggcttggataggcgaaattgacaccttcaaacttgacgtggcccgtgataggaaatcggagatctcccctttcttcaacagtgtccgtagttaatcgacgtaagcgatcgaagtccgctgtggccatctttgtcttggcgatctcgggaactgtgcatgagttgggattagctttgagcaacgacgaaggcatggaatcccgcgttcgagctgaaggaaccacttactaaaatccatgaattgcgaagcaaaggtcacactgaagagcaccagcgagtagacttgcatcatggttgggaaatcatagtatcctttcacgatgaagatggctgagacatagatcagcagcgctgtggatggaatcaacttagcagcgcttctcgatcgttgtcgtgctgatcttaccttgcacaaagtagggtagtgcggtacctgtgccgtttccgattcctgtcccccacgccgcgacattcccggaccgcagcgttgtgacgagatctgtagaaaagcgagtgcggaacgtgtcttccaatgccatggcacggatgccgcgaacattcgcaacattctgcggatggtcgaagggaagtaagccaacgacgacgatacaggtatgttttctcccgtgtgatcttacctcgtagaacgtcctagaaacctgttcacgtgagaacttgttcttcgcctccagcaggccgatgatccttgactgtaagatggtgatcagggcgaagatgggagctaccgccaagccgaccatggtgagcttccagcccgtcgccatggcccaggctacaccagccacgatcatcacaaccaccatagttgagtgaccgataatggtggagaccatcgctttcatgtcttcggcgtctttaactaatgtgtgaaccaaccgactcgaaccattttcacgacgatcgaaccaagattgcggttgagcgatgaccaattcgaaggctttggcccgaagcatcctgatccagtctccagccatcttttcgagaaagaagaactgtgcgcctagagcggcggcgtctcccaccgtgataccgagaatgcgaagcgatagggtggtgatatagctcttattgtcccccccagcactgacagccgacatgagcaaggcaatctccttggaccagagaggcgtcaagatgccgtgtccgatagcccctgtcagaccgagcacgccaagccatttatttgggacgctgggtagatgggttcgaaggagagtccagatggatgacggcgcagccgatggctgaatgaactccgcttctggaatcggcgaggtgttcgtgcttccatcaatcttgatttgcatatgggataccgattcatcttcctgaatccactgacgcctaccgtaagaaagtggcgatgcagttgaaggcgaaatttgacccgccgatttctccagcattgccatgaagtccgtctcgccaccaacttcggatcgcaagggataattcctggccatgctagaggcgggtcgggccgtttgaagcgggctaggtgtttgaagacgatccggcatgttcaccatgctatgtcggtggctgagtcgatttccaggtgccatcaacattgaaagtcgcttggggaccctatctttgggcggaagcccagtcgtattgtggtagtccgagaggatgtcgagatatgttgaacacgcattactcttgacgacactctggcgtgaatgcgagcggaagctttgtctagagatgggacgcaagctgagatagcctggacggatcttcgactcgtcttcaagcatgacctcgagatcatccgctgtctcccaaggatccctgtcgactgaggggaagggtacctgggcttgtatcgtggccatgaccccaaaatcggaagtttcgcgcaggatgaggtccgatcggaagccttgctcgacgatgcgaccgttcttcatcagatagaggaagtcgtcgttctgaatttgggatagatcgtgggtaatgacgattgtcgtgcgattctttctccatcgcttgatcgcctcgaagaccaggatccgagaggtcgcgtctaacgccgaagtcgcctcgtctgatacggagaatgtcttcattagctccaataaggtttccttcgggagtgtctgtcactaacctagaatcagcacagtcgggtctcggagtcgagctctcgcgatcgccaaacgttgtttctgcccgccactgaggctggctcccttggtgccgagcttcgtctcatagccttggggcaggccactaatgaactcgtgcatcattgccattttgcaagcctccactacctgatcgcgagtggcgttttcgggtttccgataggacaagccagccagacccatcgcgacattgtcatgaacgctcatgtcgaagaggatacagccttgctgtactgcagcaacgtgctcctgcgtgaaccccatatccagatactgaacatcctgatcatccagcgtgagctctccatggtctggcggatacagccgcagcatcaattgagcgaccgtcgatttgccggatcctgatcctccaacgacaaaggtagtctctccagccggtagaaacaacgttacattgtctagcgcgagcgtttccggcctcgatgggtaagcgaaagtcacgccttgcaggttgaattcgcctttggcactgtttggcttcactttccggagagcgagcgacgctgtcttgttggtccgcggcttcgacctcgtccaaatcttcgaacggaacatcgacatcgtcggggataaaacctcatttgtgagggtagcttcggaatgcgcggagctgggtcgaaccctccccttggctgcagtcggagcttccatcaaggcgaccagtcctgccatactctccttaccgcgtgtgatctgaacgagacgaggaacgaattgttgcaagctcgcgctgcccagaagacatgcccaaaagacggtcatcacggtcgctgctgagacttcgcctgatctgacgagacccgagccgtaccaaaatccggcgatgaacatcgccatgaggacaaagttgccgaatgccgctgaaatggaccagacgacagcctgaccaacaaagttggcccttgccttttcgacaccgtgctcaaacttgtcgaactccatctgttgagcgttgaaagctttgaccgtgggcatcgcgctagtcgtccgttcgacattggtgctcgcttcagcaagagcccggcgttcggcggcgaacattgggttgacaaagatctgggtaatgatctgtacgatgacgagaagtgggatggccgatgtagtcaccagggtgagccgccaggatttaatgagcgccatgatgaagcatgccaggaaggttgaggtgtcctgaatggattgacccatgttcatcccgcatgctatacgaacgtcgtcggtctccctaggagcataatcccacagattgggtcaactcccggtcgctagatactggactgtgacctattaactcacctggtaaacttgctcattaacccgccggccccaacattctcctcggcgtcttcacccactgcctctttgttctcggcaaactcttcggccttcaatcccatacccagatcgaaccactccatcccccgctgcatgacactctcgaaaacggcacctctcaaccgatgagcgataagttcccctacgcggacccagagtccgatcatcacacagttgacgacccatccggcgaggccgaccagtgtcaggattaggcagctatgagagatgtcggccatcaacttggatctgtcctccggagtggattgacgaacgtcgagcggaaagtaggaaaacgcttcgaaagcgtctccaacgagaatggtcatgtacatgggtactatagcagcgacagccgctaggatgacaggcgggacgatccggaagaggatatcttgagtggtacagttgcgaaataggagtcgaaccgtgcccttcggcgggatgtacttcggcaggtcatgttcttccatcgacccgctttgtttctgagcagtatccatgtcaccagtttcctgcggttcgaaagggttggatcctcctgctgcccactgactagaccggctgttcgcggtagtatttcgataccagtcttgtttcccgacgaataacgcttgtgagttgtggaacggactctcctccagtgtctgtccggaatccggcagtcccgaagggggcggtgtggcaggtgccacctcggtcaactcgacttcctcttcctggagagtgtcggctactttgtgtggcagttcttgcttgaaggcacgggatactacagcgtgcgcgtgctgggcctcggacggagtcggcgagcttagaatcgtagaatcgtaatgacgatgaagctccgacggggtcgaaggggtatatggggattgaacttgaagcaatggcgtccagtttctcggtgtggctggtgtagatggaggtggggttgtcgttataatggggatgccatgccgaggtgatctgtagacggggttgtagtcgacatattggtcgtggccatcatcctcaccggggggtccgttaaggtgagggttgctggtgaagctcatgctgatccacccgacgatttgatgaaaggacccgaggtagaagttgattcaaccgttctatgtcgctttcttcctttcacaaatatccttttcgattcttgcagcgactccttctcctcgcttcgatctagacggtccgcccaggttgtcgcttgatgatttgccatacctgacgtttctgttctcttgtgcttggtggtagtagtagtgatacggctttggaagctccaagctgtcgtaaaggagagagaatgacattcctttccctcttgttctatttggcgaccgagcagttgcaaagggtcttttgttctcccaagacggagatggccggaagtgacgtcacgtgatcgtaatcgacaaacgcgcttcactgatcgttactcgacaaaccttcgtgattcccttccagcttcctacccatatgacggatccctcgaatataaaagaacggtattaatagcctgagttgctgttgcttggcaccaaactgctctggttaaaagacgccacacctcgacctcatctcggctgcagcgtttttactcagcgggagctagagtatccggcttgacgactcgcttcttgctttaccattcttaacatcgcaaaagacctttgaataaaaccgggacagcggacctgaaaaggcgcgtatgtgtgctttgtttgcgatcctggaaaacaggtgttctgtcttgttgttgggcttgaaatggtgatcgccgctcattctagccacgcctgacttaccgttctactatgcatttgtatcggtccttgtccacaaacaggttatcctcatgagacatttactaatcatagctgacctcaagcatcgagactttacggactcattcaaaatgttagggcattgggatcctctgacctaccgtctttcctttcccgggatgtttgacatctctctccaggtcctccttggcgctcagtctcctggtgggagcagtaggattgaaacggtccagcttgacgggtctgagagccgaggctatatgcgatgggaatttgcggtggctttgggatcgaggctcttttcgccctgccaacacgctgtcggcgtcagtttcgccgagtgagcaccaagagctcatttttcccttctgtgggtccgcttagtggtaagtcccatcccctagcctttcaatgacagtcatgataacacggtcggggtattgttacatcctgaggttgctttttgggcaagaggggtaagagccgaacaggtagtgattagagcttgaataatcgttgcagcttagacggtttcctaaacagctcattgttctctctccacttggcaatttgcatcataaatttgcgtaacttttatctccgaatgtttcaacctattctgacgtcttcacaccgtccgatcatccagctgaggctactgattgtgctccttgcactgatacgcgtccttcctagtcatttgccgatgtgtgaacgtttacgcgttagcgtgtgattttgcgaccggtttcacgtttcggcgatcaaaaaataccggctatatcgacgtgatgagagcgccgagaacactcatcacaacaaaaccctcaggaacagcatatcgcatgccttctgtcaaatcgcggatgctgctcttattccatcggaccttggccctcttccagaagcggcctccacgactgcgctttctttctgggcaacccgctccacactttccgcttgcgcagattattttcatccttccgcctgtcgccccaggccagaatcaatatataagaagctcccccgcgcccaatccccctccctttcaactcgccttccatcttccctttgggccatcactctcacgtctctagtttcttcccacttcttgcacccttctcttcgtctggcattccgtacatagccagcctacagaagctgaccttcagaactctctttcgattgctatatctttcttgcgacccccgcagcaaagcgtaagtatgacatcgatgtcagcgtaccaactcctgacccgcacctttcgcttacgatggcctccctcttccgcagaccccctcgagtctcgttcggcgatcggaaaaaggatgccatagcacgtaacggtatatcaaccactatggacttggcctaaaatacctattcttagctgacatcctcctcgctttcggatgtaatcctccggccttctgacagtctgactgattgaccaagatcgcctctggatcgtttgggtcattcgctggaagataccgtgacagtgacggataggagctggactgggaccgattctggccatttgctttggatcgtacaggcgagtagctcctggtacgggagcttcgccgcctcctcctccaggaaatagtcgagttggcagcggagcatactcaggccgtgtaaaccgctggccgcgaaagctctgatagtcgccgtaaagaatgtgttgacacacagatcgagcagtcttgggctggtgagaagagacctgagaggctccgtttgatcgagtccatagtcgtctacccggtacgacatatactgtaggttgggcattggcggcagggccacaagggtcccgttgtagatatcggcgtctatgacttccacgtgttccatagttttttcagatactggagttacgaaagcccctgtgatatcgtaaaaacgcctgctcttccttaggtccaagaatgcttcggagccgaaatttctcctggtctttgacggccaaagaccagtcattgagactcaagacctctctctcactagacgttgtgacatatgtgacatccaagtagggcatctcggcgcggtcgcaaggtatggtgattaggaattccatgggccttaccggagaggtgaaacatatggtctcgagcttcggatagtctctgagaagtttttccacctcgatccgggccggattgttagggttcttcaaggtcaagtattttaatttcgagcgatatgctgaataggtagcagccgtgtctgtaccgggataagggagttccttccgcagatggaagatgccctcgtccaagcgagtgtacagcctgtcgacttgtgcgtggaacatttttcggctagttagggctaggttcaatacgtcccctttgtcgagatgggacatgatcatgtcgcgaacgagtgagttgtttctcagaagaatcatgatgggaggcgactccgcgaagtaaaagaattgatcaaatgtcaatttctgtggcgcgggattgtcgatccggcgggttgcgcctttcgatccgtgcttttttttggacatggcggtgagaactgatgtcacaatgtattcgacggctaagaagaatatgagagacgggtcatcgtgtggatgacgaaactttttgattgagacatacacgactgggaatttcctttgcagcgttccgtgactttcacggttgagtcggagtcgaaagtgtctagatcgtcgagactgttcggaacagtacctccgaacgtgagaattcaaaatccgaaattagggaaaatattcaaaatattcatgctgtttgcttaccagatcactgaacgatccggacaggcctatctgtacagaaataagccggggcgatgtcggcacgagtctagctgagagtgcacaccggcaaccaaagtcggtgatcccggtctaccgaattcaaaacggcacggtctcgtatggacccacggagttatgaggacagcccggatctcgatgtagccggtattctgcgaacagatcgagtacgctcctagacgtataattgtagaaaacgagcaagttttgattcgattgcatttcgtatggcctccatcaatatcgtgggccgctgcaattcgaaagacctgatcatccgatcgactcacgtcacgagggatgctgatcaaatttgatgagatgctcttcgccgtgctgtggatcctcaaaggttgtcttgagatagctcaacacacactggtgactaatctctcggtgtgttgacagatattttggggatttgaggcggtcctttggcggagtgagaagggttgcacctccgcacaaagcaggaattcgatcgagaagtctactgattcgtgacggagcttatcggcaatcgaaagggggtaagtgcaggtttccggcgaccttgtcaatgaattacgataactatcggattgtcttcgatctcgtaggggtatgattaggtgtaagtcgtacgattttgcgatgtttgtaggtccaataggttctcagttgcggcaggaatggcggcaggtaagcgtgaccctcctgcaattcggaagcatcagcgccttcggaagcaaataatgacgtaactagggacacccctgcaagccaagcccagctgtgccaagtgtggcatataccgggaagatataaaggcgcaacatcgcgcaagataccccgcatcaatcattcgtcctcttctcatccacatctccaatgtccagtccctccgagctttcagcttcctgaacttgacctcaactatcgtggaacccaccgtaagtcatggcaacatttcgtagcatcgcttgtgttgtcgactgacaagatgcttgtgactcttgctctgcgaagacctctgatcggacctcctttgggtccttttttccggacacgagcaattcgctagcaacgtcactactacgtcgacatcactttggaagcgaatcacacttgtgagtactcgctatcgtgacagcgtagggcaatgaactcgatcggttctcgactgatgaactcgttgtggttttctgcttgtatcagtacggccgcttcagtactgatcggttgcaaccatcaccatcgcgggtagttgggtctcgttgatcgtcgccagattcagtcacctcgaaacacccaattccggaataaagacgcttcttctctctgatcatttgtgggtttggtgacgaacttgttgccgcagcctctcatcggtctttgtctggtaaagcagatgacatcaaaactcgccgtagcttgttgtaaaagatcaactgccgtccctcacggtacaattttagggacaaaccgtcgtccctcctattcgtggctattccatcccggacgatcctcatctccgtcggtcgctgagactgtaagcaggtccgacgaccgccgcggagcgggaagcaattagactgactggtgatgtcgacatgcagtcatttgcacagcatcctatcttcccctccgacacgtatacggatattccttttgcaacaacaaggacaagcatagatctgtcgtgcggcactccctagtaagccaaaggactcttggcgtttctagcaacctcactgacgatacggggagtcgtggccagttaattaaaaacaagtcgccttcgagatacgtagctccggtcttcgcaacgtaacgaggaagtgtccggcgtaggacgcacaccatggttagtgtgtgactacgggtctgtcgactagggctgatggcactctcgctttgtgaaatgaaccagggccaacttgacgagcgacagaaagcctaggcggctctcagcctcaggatgtagcggtcccccgagaggatcaagctacgtgctcggaccaaaccccagagtttcctttctgtcaacgagactatcagcccggggaaccacgcatcatgcaacttatgcgtatcgaccacctttgggacgtcgttacggattctctggatcggaaggacaaactcaacttggctgtcactagcagccaaatcttcgctgttacagcgcacttctttctgcggtcgcaaaaccagtcatactacagctgtagagatgatgatctacgtgtgagttggtgaaaatcgtttactgctcgaatgcgccatgaatcttacacaccatcggtctggcagactaaggagggagccagaggagcagccatccgcaaaatccaccaacatacagcgatcaaactcatcttggctcttcgtcctgctaagtttgaaatgatcgacttctcgtagttcccgaaccttgaaacagtcgtgttccccgggacttttcgagaaagaacgtcgtttggaagtgacggaaattttgcgcaattgaacgaggttcctttgccgtacctgagcctaatcgcgccaagctcgaagaggggatcattgccgaattccgggtattcctacaaagagcccgtggatcctcgggctgggtatccttcctttcggctcattacgaccgctccgatggcaaaagaacctggaaaacccagagactgcagctcagaacctcgctggaggtcgctctgacggcgctgcacaggagtggcctcagggtacaacatctcgagtgctgcgagcgattcttcagtggagtcgtggacgatgatagcacttgggagtacgaagaaatactagctgacaatgtcaaagcccaatggagtcaacaaccgctggaaaagctcaccgtgtcgtgtatgggccggctccagcttgcgacccccagtgctgggcggtccacatacgaagtcgggctccttggtgtatcattcaaatcacggatgacaacccctactaccgtgacccattaaaccccagccgtcccaaagtgacagacttcattcagcaattccatgcggctgtcgctcaagcgaattacgtctccaaatctgacattaccgccgctactctggatcgttggttgatccccatgtgaccgcatggtcgaacaacattcaccgtctgactgctattgctgccgcattgtagcagcgacccttagccacgatcgcgcatgatgtagactagttttgcaacaatgaatacgtttatgatgtcgatttcatgaacacggcaaattgtagatgttgagttacaaaacaattacacacgctcaaacgctactaagacatgtcacgacaaacatggagactggaaagccattaacaatcccaagccacgccggccgccccttacttcttggcatagaaagccctctgcttctcggtggtgggcctgacgcgacgagtgtacgggacctcggcctcgtcctgggccctgggccgcttcttcatgggagcagtaggaatgactcgaatcccgctcggagcttgcggagtactggggactccagtgaccctgacctcttggtcatggaacacgtcggggggtccgacgagagggttggcgaatggggcgggagcagggacgggtgcgatggcggcgggttgaggttggacctgttgctccaattcgcccctcataacagcgaatcctttctcgaggactccgatgattttgatcaggtccttcttgcccttctgggcctgctcttcaccaaggctcaatcgagcgacctcggattggagaaaagtgacacggttggccagagcttgatcttggatagcctattcgttttctcagctcaggaaagaaacaagattctgtcctccactgccctcatgcgaggcatagcataggttctggcgtccattgtgactgtgatctgacgtgagcaagggggtcagtaccatgatgggaaagcaaccgataaaatcaaacgaacgtgggtgtacgagtatgtgtgtgtgtgtgtgtgtgtgtgtgtgtgtgtgtgtgtgtgtgtgtatgtgtgtgtgtgtgtgtgtgtacccgtctctattgtctcgcctctgtcctttttatcatacactttctcgtgtcgcttctctcgaaaatctcattttgccatcgcgagagagagagaccaacatctaacctctgtatccccttcgtctggtaatcgcaggttggaccatagtaccgcctcggcaaccatccgggaatcacaagaatccgagctctcccggcgatcccgcgctttagcagagatcgacgccgatagggagcgcgtcagggagaggttggacagggagaggatcggaagggaagctagggagaagaaggccagggaggaagaggagaggcagatgagggaggatctcgaggcggagagaacgggggatcccgatatcgatggtccgctgcggcgggaagtcgacgaggaggaggaagggtcggtcaaggtcgacaagtgaacagacatcgtcgttgtcgccgccatcgccgccgtctgatcgtgtagcctagtaaagtgtccctttccatgagtacagtgcgtacctgtagtaccaaattcggcatttcgtttcgaagtttcgattgtatcaaggacctcgattgtcgtcaccgaggagaaaggtcaacctggtttcacccgcccctgccaataagacggcgtgatgaaacaggcaaaaacaatcatagctggccttcaccctccctgatcttatacaaacacactatccatcacgacgacttgatgcatggttcctgcctatgccatcaaaatcgaaccatcgttcacctcgccatgagagggcgccatggtggcctgagctggacaagccagtcaaaccgagacccgcttcgcagacaccggtctccaaagaaacggcttcgccggcggtcgcggtcgaaagaggatgtcacgagagataccttggacgtaactaattggaacgatggcttgcgtgccaagggtcagacctctcagctgactggaatgagctgagcgagctattgcagataaagcacgggcccgtgaagagcaaacctccgatgaataccgcaagtgatctccgactgcgaatgggcatatccacacaacagactttcgaaatgcgagcatgtcacgctcagctcttccgccccacgttcgttgcttgaacgcagcgacaggcttatcgaatcgtcgaaaatggccaaaaccttgacatccatatgtgaactttaagcccgagctcccgagtgtgccttgccgcccgagtctcgtgcgagcttgcgtgagagccatgattatgcatacgtctcgtgtctagattgatccatcatcgtaacatgcgcccactactcagacacgacagttgtcgagtgccagaatcaaaatgtcctcggcgccggtcccgctcaatcggtccatgacctcggccatcttcttcctctcgaccatggcgctgacggccaaccatccttcacccgactcgagcttggacacggtcgccgcccgccttccaggggtgatcgaagtggcctcgtgcaagttgtcctcgtggatgttgtagttgacgaggacgtaacgcttggcggcgaggacaccggcgaatcgggccttcaagagggggatgatgtgggcgagttcaggggtgagcgaagggtgggcttgcgaaggagcgatgaggacggcctccgaggtcatcagagtggcgatggcgtgcaaccccgcagctcgcatggtgtcaccggattctgcaaaacggggacgttcagtctttgcagctggggtggagtctcacctcttatcttccacgtcaaacgtcggactcaccgactaaatcgacgatgccatcggccataccgagtgcacacgcagcctcgacacttcctccgacatactcgatggtcgtgctcggtcgacctctgccgtcttcgctcgcctgaaccttttcgtcaatttccttgaaatatcgtcctccgaggacttcgaaactggtagccactcgacatccggcgagatcctcgacggactggatgtgcccagatacgggaacttggacttgcagggcgcacttgccgaatccgaggggaaggatctgctcgatggcgggttcgtgaccggactcggcgatcatgtcctgacctgcgagacgaggtcggagaggtgagacaggtaggtttcaaacagaattgatgttgacataccggtaattcccaaggatacgttacccaaggcgacgaaccgagggatatcggcagctggcaggaagacgctgtcgcagcacgttggtgagtgttccgagcctgcagacctgaaccctccgagcccgacttacagagcgatgggcaagttctggaccaatgctacatctaatcggtgctgcctgttgaacttgacgtcggcacctagtcgaacgaccggtcgtcagtataggacgtcaccaagcacgtttgctgcgagcgggcttctttctcacctgcgagcagctcgatacacttctcaaagagcctccctgcagcaagtccgcccgaacgttccgtcagtcatcgtcaatcgggagtaccacgacgtcataccttacctttcttagggatggcgaaaagcattcggtccttgagactgtcgaccagcaaggacatggccgactcgctcgcaaacctcgacctgggcgggttggccgagggggtacccgacgaagccgtcgtcgttccgttgaccgagttggacattgtttttggtctggtatattatagctggtttggggtctaggaactgtccgtcagagtagatggtctagctgtagatgaccaagggttgtttccataataatatgaactacttggtcaagtcatccagagacgagaccatccttcgggcgacgcgcgatcatatcggaaagtgagcgagacaggttccatcacgtgattctcagagtgacgacggtcagggatatagctagctcgcattcatacatcgtcatggtcatacggggaggcgatatcgaggcaggtgatcgggtcaggtactgtcagaaagaggaggtcgaaaacatctcaagctttggccaatgacgaaaggtcaaagggagggaactcggtgccctctgccggttgaggagtcttcttgttgttggggtgttgcatctccctaacaatcgacaacgagatgagatgacacgtttagcagcagttcaatcagtgaatgataccgggacctgtcaaccggaacgtaccggtagatggcggtcaaaacggattcaagggtgtattcccgcctccaaggctgaagagcagtgagcttgcttacattaaccttttttggttttcagggcgatcatcagcatagccattctgacaagtccacagggcccctcttgagacgactcacgagtcctcttccatctacacacgtcaggttgaccttgctctcaaacttgacgaggggaggtgcgtccgggtacgtcgcatccgccaacaaggtgagcgagtagatccggttctcgtgtgcggtctacaagcaccgagaacagcgaaagtcaatcgactgtttcctcgtcatagtcacaagcaccgaggattactgacgtgaggaggtccaaggatggtcccgttccattccttcatgtcgaggtcatcggggttctatcaatcggacgaattgcaaatggtacgatcagattcggtcgtccgttttcctctgccataacgttgtcatccggtcgacctccatacatctctcgttaatcgaggtgaactccctaacaagagacaagccggatgagatccgaagggtgtgcgacactcaccttgagaccgtagctagtgctactgttccccaaccccttctctcccttttccaactcttccagaagacggaatgatctagggactgaattcgtgcgtcgacgggacggaaggtagtgcattcgtaggttttcatatcatggtccgggattaggaagggttcatgagggtcatagcgggagttgatattcacagagatcagtcgggatagagcaatagagagtgatcggtaagtttgttaagctcttggtccgatcgatagtttcccatgtgtgatagaacttactcttggccatttgtaaacgaaatttgcttgaattcttatgcggtttacgacagattgggtaaaacgaaagacggatcaacgagttaggtgtcggttagtcttgtcgatccgtatttgcgcgtgctgggctttccaagatagggtccagcaactcaccgtaagtcggatcaaagtgtagctttgtgacagacagtactctaggccaaagtgaaggatctgaacgatgatgagtgaatgcccgatgtcatatgatgtgttgatcgatcgtcgtcagtcgtcgaggtatgatccgacggagctagatgggatgggatgagcctgacctgacctggcctcgtcatcttgttagagctgagacttgcagttgaccctggagtaggcgatatgcgtggggtgatatcgagtaagtgcaatggctgtgtcatacactcacatacctcggccatacatcatcattcatgccacctagtggctaggatattgctaaattaagcagactcttgaagagagtatagataacactcgaacatcgcgccatccgaacgacggaaagcaacggcattcatgttcaaggcagctcccaccaacccgtatgacgagctcgttagtaagtcggctctcccttgtccccttttacagattggaacgcccatccagccaaggactatcaacgctgaccgatatccatatgtgactctgatgtgctacagtcaaggcgactcatgaggatctgctgtcggaagattgggataccaacttgaccatatgcgacaaggtccaggcagaaggcgaagtagggtaagtcgttatgatccctcgatttcgacctggctaaatcgaggaccgagcgatggttctggagtacagtcaaccgataaactttcttggctgacgataatcacaaacgaaacagcgcaaagaatgtcattacatccctcttgaagcggctagtgcaccgtaaccctaacgtccagatcttctccctcgaggtaagctcccacgcctcatcccagacctctagatccgccctcactgacctcccacatccatatcccatctcctcagttggccaactctctttatcagaactgtggcaaactgttacatctcgagctcacctctcgagcatggacgggcgcgatggatcgcctgattacggatcgcacgaccgttcaacaggtcaagagcaaggcagtgggatacgtgaatacctggtggcaaggtttgaaagggggggaagctgaaggggtgatgggtgaattgatcgagagcttgaagacgaagagtgcgttggagcagaaagtgtggacatgtcgagtggcaagctgacgagttcattggcggtagatgttccgctagacgctcctgttaagcgagtctcggaggacgaggtgagtgcattcgcaagaactaccggacaaaccatcctccgtattctgacagtctcgtccctctgaatgcacgctaggcaaccaaacgagcacgcgaagaagaggccgaattgcaacgcgtgctagagttgtcaaagcaggaccaaggtggaaggaattctcaaccggctcaaggcgcaagttcgagcgggagtggaagcggggccggtccatcctcctcacaacctgccacttcctatgctggtggcgcttcctctgctatcccttaccaccatgccccacctggtcctgccgccaagaccggcagcgagccccggcccttcccggctcgcgaacctacaccgcctccgatgccaacccgagccaccgcttcccgggtccgagcaatctaccctttcgtgacccacgaaaagggagagttgagctttgacaagggtgatgtcatcaaggtcatcgacaggatgtatgacgaatggtataccggagcagtgggcgggaggatcgggattttccccgtcagctacgtggtgagaccgattcttcatgcagccattctctcgcttgtgctcatgcctcctcggatggacaggaaccccttcccgatccaactacccaggaattgcagagggaagcgcaggaggaagccaagatctttgctgcacaaggtaagccgcaacgctcatgtcgttagtcgacccgtcttgactcgtttgtgctcgatacgcccaggaatgattgtcaacctgcagcggatgctagacgggctcgatccttctcgaggagacaggttggatgatcccgagctggagaacatgtatcagaaagtcgtcgagttgcaaccccagatcgtctcgctcatgaaaaagtacgccgatcaacgaggtgggtccttctgtcctttccaatcgctgctagaggtatttcgtcgttgagctgatcagaattttcatgacgttcatctagcggaacttgaacacattcacatgggattcgtgaaggcctcgcgacaatatgccgtgatgactcagccacaacaggcaccgaacggattcggtcagcccgctcaggatcgtatgttcatctcatcagtgacgagagtttcacgaggaatcgcaaactgatcgaccgacttttgatagcttatggtgctcacggcgtacatcaacagcaacgtcagactagctacggatcgcagccaggccaagtcgctcagaatgacgaccccgctgctcgccaacaggccgaacacgcagccgcatgggcggcatattacgctcaaatggctcaacatcaacaagcaatgtctgccggggaccagaccaccggcttgcaacagccgggccagctgcaacagatgccgccgcaacagcaacaagcacaccagcagcaacagcaacatccgcaagaacaacagcaatatcgacagcagcaagaaccacaggctggagtgcaaagcgaggctgagcgggagagaattgcggcggcgtggcaggcgtattacgccgctcaagcacaggctcaagcacagggacagccgcagaaccacgtccaaggtcaaggccaggtcggtcatcccggtatgcatcagcactctggctcctatggccaagcccctgtagccgtccctcaaggacagcatcctggctatgcgcagggctccggctcgacaacccatttgccactggcgagatctccagaacctgctgctcagccattgctgccgcacgaatcgacgcagcagcgattcgatggacgaagtttgagcgaagacgcgatgccgaatccttacagtactgggggagaagcgccctcagcgccgtcctttccgggtcagcatgtgcaccagaactcatctacctcgtatcttcctctcgagcgtcaaacaagtgcggctccgcctgtcgctcccaaacccgccatccaagtgtcacacgagtcttcggccccgtatgcttccgctgagcagggcggggcgtatggtgcacctgagtctgcgcacccgtatggttcgccgtctccgatgcaaggcgagaaccacagtagccatcccggatcatcgccttacatgcacccaccgcctcatcaggtgcacgccagccagggtagcttgacacagcaacagacgtggactggcggaccacctgcaacaagtcccatgcatggcctcgaacgagccgtcagcaatctgtcggtcggcaatgctccaccagcgccccatgaagcgagattcgtctgatgagcatgtaatgtataagtaatatgttgcctattgatctatacctcacgaaacctcgcaaagcttgcgaacttttgacatgagtcaggtgagaaagaggaaacacttgtgtaaacactcaccatggaataactcctg
